United States Patent Application Publication US 2013/0267429 A1 - sequence listing, part 27

SEQ ID NO: 657438 - DNA, 55 bp, Artificial; identical to SEQ ID NO: 292112
  Synthetic oligonucleotide

SEQ ID NO: 657439 - DNA, 55 bp, Artificial; identical to SEQ ID NO: 293149
  Synthetic oligonucleotide

SEQ ID NO: 657440 - DNA, 55 bp, Artificial; identical to SEQ ID NO: 292114
  Synthetic oligonucleotide

SEQ ID NO: 657441 - DNA, 58 bp, Artificial; identical to SEQ ID NO: 293194
  Synthetic oligonucleotide

SEQ ID NO: 657442 - DNA, 56 bp, Artificial; identical to SEQ ID NO: 293205
  Synthetic oligonucleotide

SEQ ID NO: 657443 - DNA, 52 bp, Artificial; identical to SEQ ID NO: 293993
  Synthetic oligonucleotide

SEQ ID NO: 657444 - DNA, 55 bp, Artificial; identical to SEQ ID NO: 292115
  Synthetic oligonucleotide

SEQ ID NO: 657445 - DNA, 55 bp, Artificial; identical to SEQ ID NO: 292117
  Synthetic oligonucleotide

SEQ ID NO: 657446 - DNA, 51 bp, Artificial; identical to SEQ ID NO: 294528
  Synthetic oligonucleotide

SEQ ID NO: 657447 - DNA, 55 bp, Artificial; identical to SEQ ID NO: 292120
  Synthetic oligonucleotide

SEQ ID NO: 657448 - DNA, 51 bp, Artificial; identical to SEQ ID NO: 294502
  Synthetic oligonucleotide

SEQ ID NO: 657449 - DNA, 55 bp, Artificial; identical to SEQ ID NO: 292123
  Synthetic oligonucleotide

SEQ ID NO: 657450 - DNA, 55 bp, Artificial; identical to SEQ ID NO: 292124
  Synthetic oligonucleotide

SEQ ID NO: 657451 - DNA, 52 bp, Artificial; identical to SEQ ID NO: 292760
  Synthetic oligonucleotide

SEQ ID NO: 657452 - DNA, 51 bp, Artificial; identical to SEQ ID NO: 292125
  Synthetic oligonucleotide

SEQ ID NO: 657453 - DNA, 55 bp, Artificial; identical to SEQ ID NO: 292126
  Synthetic oligonucleotide

SEQ ID NO: 657454 - DNA, 52 bp, Artificial; identical to SEQ ID NO: 293949
  Synthetic oligonucleotide

SEQ ID NO: 657455 - DNA, 50 bp, Artificial; identical to SEQ ID NO: 296199
  Synthetic oligonucleotide

SEQ ID NO: 657456 - DNA, 52 bp, Artificial; identical to SEQ ID NO: 293946
  Synthetic oligonucleotide

SEQ ID NO: 657457 - DNA, 55 bp, Artificial; identical to SEQ ID NO: 292128
  Synthetic oligonucleotide

SEQ ID NO: 657458 - DNA, 51 bp, Artificial; identical to SEQ ID NO: 294697
  Synthetic oligonucleotide

SEQ ID NO: 657459 - DNA, 54 bp, Artificial; identical to SEQ ID NO: 293228
  Synthetic oligonucleotide

SEQ ID NO: 657460 - DNA, 55 bp, Artificial; identical to SEQ ID NO: 292131
  Synthetic oligonucleotide

SEQ ID NO: 657461 - DNA, 55 bp, Artificial; identical to SEQ ID NO: 292133
  Synthetic oligonucleotide

SEQ ID NO: 657462 - DNA, 52 bp, Artificial; identical to SEQ ID NO: 294157
  Synthetic oligonucleotide

SEQ ID NO: 657463 - DNA, 52 bp, Artificial; identical to SEQ ID NO: 294158
  Synthetic oligonucleotide

SEQ ID NO: 657464 - DNA, 50 bp, Artificial; identical to SEQ ID NO: 295970
  Synthetic oligonucleotide

SEQ ID NO: 657465 - DNA, 55 bp, Artificial; identical to SEQ ID NO: 292137
  Synthetic oligonucleotide

SEQ ID NO: 657466 - DNA, 55 bp, Artificial; identical to SEQ ID NO: 292139
  Synthetic oligonucleotide

SEQ ID NO: 657467 - DNA, 51 bp, Artificial; identical to SEQ ID NO: 294594
  Synthetic oligonucleotide

SEQ ID NO: 657468 - DNA, 52 bp, Artificial; identical to SEQ ID NO: 294130
  Synthetic oligonucleotide

SEQ ID NO: 657469 - DNA, 52 bp, Artificial; identical to SEQ ID NO: 294131
  Synthetic oligonucleotide

SEQ ID NO: 657470 - DNA, 51 bp, Artificial; identical to SEQ ID NO: 294622
  Synthetic oligonucleotide

SEQ ID NO: 657471 - DNA, 51 bp, Artificial; identical to SEQ ID NO: 294639
  Synthetic oligonucleotide

SEQ ID NO: 657472 - DNA, 51 bp, Artificial; identical to SEQ ID NO: 292141
  Synthetic oligonucleotide

SEQ ID NO: 657473 - DNA, 57 bp, Artificial; identical to SEQ ID NO: 287949
  Synthetic oligonucleotide

SEQ ID NO: 657474 - DNA, 48 bp, Artificial; identical to SEQ ID NO: 292207
  Synthetic oligonucleotide

SEQ ID NO: 657475 - DNA, 54 bp, Artificial; identical to SEQ ID NO: 293370
  Synthetic oligonucleotide

SEQ ID NO: 657476 - DNA, 54 bp, Artificial; identical to SEQ ID NO: 293367
  Synthetic oligonucleotide

SEQ ID NO: 657477 - DNA, 53 bp, Artificial; identical to SEQ ID NO: 293740
  Synthetic oligonucleotide

SEQ ID NO: 657478 - DNA, 52 bp, Artificial; identical to SEQ ID NO: 294150
  Synthetic oligonucleotide

SEQ ID NO: 657479 - DNA, 50 bp, Artificial; identical to SEQ ID NO: 295019
  Synthetic oligonucleotide

SEQ ID NO: 657480 - DNA, 55 bp, Artificial; identical to SEQ ID NO: 292208
  Synthetic oligonucleotide

SEQ ID NO: 657481 - DNA, 53 bp, Artificial; identical to SEQ ID NO: 293748
  Synthetic oligonucleotide

SEQ ID NO: 657482 - DNA, 55 bp, Artificial; identical to SEQ ID NO: 292210
  Synthetic oligonucleotide

SEQ ID NO: 657483 - DNA, 53 bp, Artificial; identical to SEQ ID NO: 288949
  Synthetic oligonucleotide

SEQ ID NO: 657484 - DNA, 51 bp, Artificial; identical to SEQ ID NO: 294706
  Synthetic oligonucleotide

SEQ ID NO: 657485 - DNA, 54 bp, Artificial; identical to SEQ ID NO: 292211
  Synthetic oligonucleotide

SEQ ID NO: 657486 - DNA, 59 bp, Artificial; identical to SEQ ID NO: 288472
  Synthetic oligonucleotide

SEQ ID NO: 657487 - DNA, 55 bp, Artificial; identical to SEQ ID NO: 292214
  Synthetic oligonucleotide

SEQ ID NO: 657488 - DNA, 58 bp, Artificial; identical to SEQ ID NO: 288494
  Synthetic oligonucleotide

SEQ ID NO: 657489 - DNA, 59 bp, Artificial; identical to SEQ ID NO: 288517
  Synthetic oligonucleotide

SEQ ID NO: 657490 - DNA, 55 bp, Artificial; identical to SEQ ID NO: 292217
  Synthetic oligonucleotide

SEQ ID NO: 657491 - DNA, 52 bp, Artificial; identical to SEQ ID NO: 294215
  Synthetic oligonucleotide

SEQ ID NO: 657492 - DNA, 55 bp, Artificial; identical to SEQ ID NO: 292219
  Synthetic oligonucleotide

SEQ ID NO: 657493 - DNA, 53 bp, Artificial; identical to SEQ ID NO: 293641
  Synthetic oligonucleotide

SEQ ID NO: 657494 - DNA, 55 bp, Artificial; identical to SEQ ID NO: 292221
  Synthetic oligonucleotide

SEQ ID NO: 657495 - DNA, 55 bp, Artificial; identical to SEQ ID NO: 292222
  Synthetic oligonucleotide

SEQ ID NO: 657496 - DNA, 55 bp, Artificial; identical to SEQ ID NO: 292223
  Synthetic oligonucleotide

SEQ ID NO: 657497 - DNA, 55 bp, Artificial; identical to SEQ ID NO: 292225
  Synthetic oligonucleotide

SEQ ID NO: 657498 - DNA, 53 bp, Artificial; identical to SEQ ID NO: 293608
  Synthetic oligonucleotide

SEQ ID NO: 657499 - DNA, 52 bp, Artificial; identical to SEQ ID NO: 294222
  Synthetic oligonucleotide

SEQ ID NO: 657500 - DNA, 51 bp, Artificial; identical to SEQ ID NO: 294422
  Synthetic oligonucleotide

SEQ ID NO: 657501 - DNA, 54 bp, Artificial; identical to SEQ ID NO: 292228
  Synthetic oligonucleotide

SEQ ID NO: 657502 - DNA, 55 bp, Artificial; identical to SEQ ID NO: 292230
  Synthetic oligonucleotide

SEQ ID NO: 657503 - DNA, 52 bp, Artificial; identical to SEQ ID NO: 294189
  Synthetic oligonucleotide

SEQ ID NO: 657504 - DNA, 55 bp, Artificial; identical to SEQ ID NO: 292232
  Synthetic oligonucleotide

SEQ ID NO: 657505 - DNA, 55 bp, Artificial; identical to SEQ ID NO: 292234
  Synthetic oligonucleotide

SEQ ID NO: 657506 - DNA, 55 bp, Artificial; identical to SEQ ID NO: 292235
  Synthetic oligonucleotide

SEQ ID NO: 657507 - DNA, 55 bp, Artificial; identical to SEQ ID NO: 292236
  Synthetic oligonucleotide

SEQ ID NO: 657508 - DNA, 54 bp, Artificial; identical to SEQ ID NO: 292982
  Synthetic oligonucleotide

SEQ ID NO: 657509 - DNA, 55 bp, Artificial; identical to SEQ ID NO: 292237
  Synthetic oligonucleotide

SEQ ID NO: 657510 - DNA, 52 bp, Artificial; identical to SEQ ID NO: 294197
  Synthetic oligonucleotide

SEQ ID NO: 657511 - DNA, 54 bp, Artificial; identical to SEQ ID NO: 292999
  Synthetic oligonucleotide

SEQ ID NO: 657512 - DNA, 55 bp, Artificial; identical to SEQ ID NO: 292175
  Synthetic oligonucleotide

SEQ ID NO: 657513 - DNA, 55 bp, Artificial; identical to SEQ ID NO: 292177
  Synthetic oligonucleotide

SEQ ID NO: 657514 - DNA, 53 bp, Artificial; identical to SEQ ID NO: 293648
  Synthetic oligonucleotide

SEQ ID NO: 657515 - DNA, 55 bp, Artificial; identical to SEQ ID NO: 292180
  Synthetic oligonucleotide

SEQ ID NO: 657516 - DNA, 54 bp, Artificial; identical to SEQ ID NO: 292181
  Synthetic oligonucleotide

SEQ ID NO: 657517 - DNA, 55 bp, Artificial; identical to SEQ ID NO: 292186
  Synthetic oligonucleotide

SEQ ID NO: 657518 - DNA, 54 bp, Artificial; identical to SEQ ID NO: 294515
  Synthetic oligonucleotide

SEQ ID NO: 657519 - DNA, 51 bp, Artificial; identical to SEQ ID NO: 294861
  Synthetic oligonucleotide

SEQ ID NO: 657520 - DNA, 60 bp, Artificial; identical to SEQ ID NO: 294959
  Synthetic oligonucleotide

SEQ ID NO: 657521 - DNA, 55 bp, Artificial; identical to SEQ ID NO: 292188
  Synthetic oligonucleotide

SEQ ID NO: 657522 - DNA, 55 bp, Artificial; identical to SEQ ID NO: 292190
  Synthetic oligonucleotide

SEQ ID NO: 657523 - DNA, 51 bp, Artificial; identical to SEQ ID NO: 294980
  Synthetic oligonucleotide

SEQ ID NO: 657524 - DNA, 57 bp, Artificial; identical to SEQ ID NO: 295959
  Synthetic oligonucleotide

SEQ ID NO: 657525 - DNA, 51 bp, Artificial; identical to SEQ ID NO: 294945
  Synthetic oligonucleotide

SEQ ID NO: 657526 - DNA, 52 bp, Artificial; identical to SEQ ID NO: 294063
  Synthetic oligonucleotide

SEQ ID NO: 657527 - DNA, 51 bp, Artificial; identical to SEQ ID NO: 294936
  Synthetic oligonucleotide

SEQ ID NO: 657528 - DNA, 55 bp, Artificial; identical to SEQ ID NO: 292197
  Synthetic oligonucleotide

SEQ ID NO: 657529 - DNA, 53 bp, Artificial; identical to SEQ ID NO: 290894
  Synthetic oligonucleotide

SEQ ID NO: 657530 - DNA, 49 bp, Artificial; identical to SEQ ID NO: 290916
  Synthetic oligonucleotide

SEQ ID NO: 657531 - DNA, 55 bp, Artificial; identical to SEQ ID NO: 292199
  Synthetic oligonucleotide

SEQ ID NO: 657532 - DNA, 51 bp, Artificial; identical to SEQ ID NO: 295010
  Synthetic oligonucleotide

SEQ ID NO: 657533 - DNA, 55 bp, Artificial; identical to SEQ ID NO: 292200
  Synthetic oligonucleotide

SEQ ID NO: 657534 - DNA, 60 bp, Artificial; identical to SEQ ID NO: 290949
  Synthetic oligonucleotide

SEQ ID NO: 657535 - DNA, 53 bp, Artificial; identical to SEQ ID NO: 290961
  Synthetic oligonucleotide

SEQ ID NO: 657536 - DNA, 50 bp, Artificial; identical to SEQ ID NO: 286799
  Synthetic oligonucleotide

SEQ ID NO: 657537 - DNA, 53 bp, Artificial; identical to SEQ ID NO: 293870
  Synthetic oligonucleotide

SEQ ID NO: 657538 - DNA, 55 bp, Artificial; identical to SEQ ID NO: 292202
  Synthetic oligonucleotide

SEQ ID NO: 657539 - DNA, 59 bp, Artificial; identical to SEQ ID NO: 291127
  Synthetic oligonucleotide

SEQ ID NO: 657540 - DNA, 60 bp, Artificial; identical to SEQ ID NO: 291116
  Synthetic oligonucleotide

SEQ ID NO: 657541 - DNA, 55 bp, Artificial; identical to SEQ ID NO: 292203
  Synthetic oligonucleotide

SEQ ID NO: 657542 - DNA, 51 bp, Artificial; identical to SEQ ID NO: 294755
  Synthetic oligonucleotide

SEQ ID NO: 657543 - DNA, 55 bp, Artificial; identical to SEQ ID NO: 292204
  Synthetic oligonucleotide

SEQ ID NO: 657544 - DNA, 60 bp, Artificial; identical to SEQ ID NO: 291105
  Synthetic oligonucleotide

SEQ ID NO: 657545 - DNA, 55 bp, Artificial; identical to SEQ ID NO: 292013
  Synthetic oligonucleotide

SEQ ID NO: 657546 - DNA, 54 bp, Artificial; identical to SEQ ID NO: 293091
  Synthetic oligonucleotide

SEQ ID NO: 657547 - DNA, 55 bp, Artificial; identical to SEQ ID NO: 292014
  Synthetic oligonucleotide

SEQ ID NO: 657548 - DNA, 53 bp, Artificial; identical to SEQ ID NO: 293912
  Synthetic oligonucleotide

SEQ ID NO: 657549 - DNA, 55 bp, Artificial; identical to SEQ ID NO: 292017
  Synthetic oligonucleotide

SEQ ID NO: 657550 - DNA, 55 bp, Artificial; identical to SEQ ID NO: 292018
  Synthetic oligonucleotide

SEQ ID NO: 657551 - DNA, 54 bp, Artificial; identical to SEQ ID NO: 293084
  Synthetic oligonucleotide

SEQ ID NO: 657552 - DNA, 54 bp, Artificial; identical to SEQ ID NO: 293088
  Synthetic oligonucleotide

SEQ ID NO: 657553 - DNA, 50 bp, Artificial; identical to SEQ ID NO: 286788
  Synthetic oligonucleotide

SEQ ID NO: 657554 - DNA, 55 bp, Artificial; identical to SEQ ID NO: 292022
  Synthetic oligonucleotide

SEQ ID NO: 657555 - DNA, 55 bp, Artificial; identical to SEQ ID NO: 292023
  Synthetic oligonucleotide

SEQ ID NO: 657556 - DNA, 53 bp, Artificial; identical to SEQ ID NO: 293900
  Synthetic oligonucleotide

SEQ ID NO: 657557 - DNA, 60 bp, Artificial; identical to SEQ ID NO: 290727
  Synthetic oligonucleotide

SEQ ID NO: 657558 - DNA, 55 bp, Artificial; identical to SEQ ID NO: 292025
  Synthetic oligonucleotide

SEQ ID NO: 657559 - DNA, 55 bp, Artificial; identical to SEQ ID NO: 292028
  Synthetic oligonucleotide

SEQ ID NO: 657560 - DNA, 51 bp, Artificial; identical to SEQ ID NO: 294966
  Synthetic oligonucleotide

SEQ ID NO: 657561 - DNA, 53 bp, Artificial; identical to SEQ ID NO: 293803
  Synthetic oligonucleotide

SEQ ID NO: 657562 - DNA, 55 bp, Artificial; identical to SEQ ID NO: 294338
  Synthetic oligonucleotide

SEQ ID NO: 657563 - DNA, 53 bp, Artificial; identical to SEQ ID NO: 291571
  Synthetic oligonucleotide

SEQ ID NO: 657564 - DNA, 54 bp, Artificial; identical to SEQ ID NO: 291604
  Synthetic oligonucleotide

SEQ ID NO: 657565 - DNA, 56 bp, Artificial; identical to SEQ ID NO: 291615
  Synthetic oligonucleotide

SEQ ID NO: 657566 - DNA, 54 bp, Artificial; identical to SEQ ID NO: 292987
  Synthetic oligonucleotide

SEQ ID NO: 657567 - DNA, 60 bp, Artificial; identical to SEQ ID NO: 291627
  Synthetic oligonucleotide

SEQ ID NO: 657568 - DNA, 55 bp, Artificial; identical to SEQ ID NO: 292031
  Synthetic oligonucleotide

SEQ ID NO: 657569 - DNA, 51 bp, Artificial; identical to SEQ ID NO: 294824
  Synthetic oligonucleotide

SEQ ID NO: 657570 - DNA, 50 bp, Artificial; identical to SEQ ID NO: 286866
  Synthetic oligonucleotide

SEQ ID NO: 657571 - DNA, 55 bp, Artificial; identical to SEQ ID NO: 292032
  Synthetic oligonucleotide

SEQ ID NO: 657572 - DNA, 53 bp, Artificial; identical to SEQ ID NO: 293795
  Synthetic oligonucleotide

SEQ ID NO: 657573 - DNA, 55 bp, Artificial; identical to SEQ ID NO: 292033
  Synthetic oligonucleotide

SEQ ID NO: 657574 - DNA, 55 bp, Artificial; identical to SEQ ID NO: 292035
  Synthetic oligonucleotide

SEQ ID NO: 657575 - DNA, 50 bp, Artificial; identical to SEQ ID NO: 286884
  Synthetic oligonucleotide

SEQ ID NO: 657576 - DNA, 55 bp, Artificial; identical to SEQ ID NO: 292037
  Synthetic oligonucleotide

SEQ ID NO: 657577 - DNA, 55 bp, Artificial; identical to SEQ ID NO: 292040
  Synthetic oligonucleotide

SEQ ID NO: 657578 - DNA, 55 bp, Artificial; identical to SEQ ID NO: 292041
  Synthetic oligonucleotide

SEQ ID NO: 657579 - DNA, 55 bp, Artificial; identical to SEQ ID NO: 292043
  Synthetic oligonucleotide

SEQ ID NO: 657580 - DNA, 53 bp, Artificial; identical to SEQ ID NO: 293844
  Synthetic oligonucleotide

SEQ ID NO: 657581 - DNA, 55 bp, Artificial; identical to SEQ ID NO: 291980
  Synthetic oligonucleotide

SEQ ID NO: 657582 - DNA, 53 bp, Artificial; identical to SEQ ID NO: 291981
  Synthetic oligonucleotide

SEQ ID NO: 657583 - DNA, 55 bp, Artificial; identical to SEQ ID NO: 291986
  Synthetic oligonucleotide

SEQ ID NO: 657584 - DNA, 50 bp, Artificial; identical to SEQ ID NO: 286618
  Synthetic oligonucleotide

SEQ ID NO: 657585 - DNA, 51 bp, Artificial; identical to SEQ ID NO: 294928
  Synthetic oligonucleotide

SEQ ID NO: 657586 - DNA, 58 bp, Artificial; identical to SEQ ID NO: 291427
  Synthetic oligonucleotide

SEQ ID NO: 657587 - DNA, 55 bp, Artificial; identical to SEQ ID NO: 291990
  Synthetic oligonucleotide

SEQ ID NO: 657588 - DNA, 55 bp, Artificial; identical to SEQ ID NO: 291991
  Synthetic oligonucleotide

SEQ ID NO: 657589 - DNA, 55 bp, Artificial; identical to SEQ ID NO: 291992
  Synthetic oligonucleotide

SEQ ID NO: 657590 - DNA, 55 bp, Artificial; identical to SEQ ID NO: 291998
  Synthetic oligonucleotide

SEQ ID NO: 657591 - DNA, 55 bp, Artificial; identical to SEQ ID NO: 292001
  Synthetic oligonucleotide

SEQ ID NO: 657592 - DNA, 50 bp, Artificial; identical to SEQ ID NO: 286698
  Synthetic oligonucleotide

SEQ ID NO: 657593 - DNA, 54 bp, Artificial; identical to SEQ ID NO: 293143
  Synthetic oligonucleotide

SEQ ID NO: 657594 - DNA, 53 bp, Artificial; identical to SEQ ID NO: 293922
  Synthetic oligonucleotide

SEQ ID NO: 657595 - DNA, 55 bp, Artificial; identical to SEQ ID NO: 292002
  Synthetic oligonucleotide

SEQ ID NO: 657596 - DNA, 54 bp, Artificial; identical to SEQ ID NO: 293153
  Synthetic oligonucleotide

SEQ ID NO: 657597 - DNA, 55 bp, Artificial; identical to SEQ ID NO: 292009
  Synthetic oligonucleotide

SEQ ID NO: 657598 - DNA, 53 bp, Artificial; identical to SEQ ID NO: 293824
  Synthetic oligonucleotide

SEQ ID NO: 657599 - DNA, 54 bp, Artificial; identical to SEQ ID NO: 292991
  Synthetic oligonucleotide

SEQ ID NO: 657600 - DNA, 55 bp, Artificial; identical to SEQ ID NO: 292077
  Synthetic oligonucleotide

SEQ ID NO: 657601 - DNA, 59 bp, Artificial; identical to SEQ ID NO: 289083
  Synthetic oligonucleotide

SEQ ID NO: 657602 - DNA, 55 bp, Artificial; identical to SEQ ID NO: 292078
  Synthetic oligonucleotide

SEQ ID NO: 657603 - DNA, 57 bp, Artificial; identical to SEQ ID NO: 289138
  Synthetic oligonucleotide

SEQ ID NO: 657604 - DNA, 60 bp, Artificial; identical to SEQ ID NO: 289238
  Synthetic oligonucleotide

SEQ ID NO: 657605 - DNA, 55 bp, Artificial; identical to SEQ ID NO: 292082
  Synthetic oligonucleotide

SEQ ID NO: 657606 - DNA, 59 bp, Artificial; identical to SEQ ID NO: 289282
  Synthetic oligonucleotide

SEQ ID NO: 657607 - DNA, 55 bp, Artificial; identical to SEQ ID NO: 292086
  Synthetic oligonucleotide

SEQ ID NO: 657608 - DNA, 55 bp, Artificial; identical to SEQ ID NO: 292088
  Synthetic oligonucleotide

SEQ ID NO: 657609 - DNA, 55 bp, Artificial; identical to SEQ ID NO: 292090
  Synthetic oligonucleotide

SEQ ID NO: 657610 - DNA, 55 bp, Artificial; identical to SEQ ID NO: 292091
  Synthetic oligonucleotide

SEQ ID NO: 657611 - DNA, 53 bp, Artificial; identical to SEQ ID NO: 293916
  Synthetic oligonucleotide

SEQ ID NO: 657612 - DNA, 52 bp, Artificial; identical to SEQ ID NO: 294095
  Synthetic oligonucleotide

SEQ ID NO: 657613 - DNA, 52 bp, Artificial; identical to SEQ ID NO: 294096
  Synthetic oligonucleotide

SEQ ID NO: 657614 - DNA, 50 bp, Artificial; identical to SEQ ID NO: 287218
  Synthetic oligonucleotide

SEQ ID NO: 657615 - DNA, 55 bp, Artificial; identical to SEQ ID NO: 292095
  Synthetic oligonucleotide

SEQ ID NO: 657616 - DNA, 55 bp, Artificial; identical to SEQ ID NO: 292096
  Synthetic oligonucleotide

SEQ ID NO: 657617 - DNA, 55 bp, Artificial; identical to SEQ ID NO: 292097
  Synthetic oligonucleotide

SEQ ID NO: 657618 - DNA, 52 bp, Artificial; identical to SEQ ID NO: 294099
  Synthetic oligonucleotide

SEQ ID NO: 657619 - DNA, 55 bp, Artificial; identical to SEQ ID NO: 292098
  Synthetic oligonucleotide

SEQ ID NO: 657620 - DNA, 53 bp, Artificial; identical to SEQ ID NO: 290116
  Synthetic oligonucleotide

SEQ ID NO: 657621 - DNA, 51 bp, Artificial; identical to SEQ ID NO: 294735
  Synthetic oligonucleotide

SEQ ID NO: 657622 - DNA, 55 bp, Artificial; identical to SEQ ID NO: 292101
  Synthetic oligonucleotide

SEQ ID NO: 657623 - DNA, 55 bp, Artificial; identical to SEQ ID NO: 292102
  Synthetic oligonucleotide

SEQ ID NO: 657624 - DNA, 60 bp, Artificial; identical to SEQ ID NO: 290183
  Synthetic oligonucleotide

SEQ ID NO: 657625 - DNA, 55 bp, Artificial; identical to SEQ ID NO: 292107
  Synthetic oligonucleotide

SEQ ID NO: 657626 - DNA, 55 bp, Artificial; identical to SEQ ID NO: 292109
  Synthetic oligonucleotide

SEQ ID NO: 657627 - DNA, 55 bp, Artificial; identical to SEQ ID NO: 290271
  Synthetic oligonucleotide

SEQ ID NO: 657628 - DNA, 55 bp, Artificial; identical to SEQ ID NO: 292110
  Synthetic oligonucleotide

SEQ ID NO: 657629 - DNA, 55 bp, Artificial; identical to SEQ ID NO: 292044
  Synthetic oligonucleotide

SEQ ID NO: 657630 - DNA, 55 bp, Artificial; identical to SEQ ID NO: 292045
  Synthetic oligonucleotide

SEQ ID NO: 657631 - DNA, 48 bp, Artificial; identical to SEQ ID NO: 294088
  Synthetic oligonucleotide

SEQ ID NO: 657632 - DNA, 52 bp, Artificial; identical to SEQ ID NO: 294086
  Synthetic oligonucleotide

SEQ ID NO: 657633 - DNA, 55 bp, Artificial; identical to SEQ ID NO: 292047
  Synthetic oligonucleotide

SEQ ID NO: 657634 - DNA, 55 bp, Artificial; identical to SEQ ID NO: 292051
  Synthetic oligonucleotide

SEQ ID NO: 657635 - DNA, 55 bp, Artificial; identical to SEQ ID NO: 292052
  Synthetic oligonucleotide

SEQ ID NO: 657636 - DNA, 48 bp, Artificial; identical to SEQ ID NO: 287367
  Synthetic oligonucleotide

SEQ ID NO: 657637 - DNA, 55 bp, Artificial; identical to SEQ ID NO: 292053
  Synthetic oligonucleotide

SEQ ID NO: 657638 - DNA, 59 bp, Artificial; identical to SEQ ID NO: 289872
  Synthetic oligonucleotide

SEQ ID NO: 657639 - DNA, 55 bp, Artificial; identical to SEQ ID NO: 292058
  Synthetic oligonucleotide

SEQ ID NO: 657640 - DNA, 55 bp, Artificial; identical to SEQ ID NO: 292059
  Synthetic oligonucleotide

SEQ ID NO: 657641 - DNA, 53 bp, Artificial; identical to SEQ ID NO: 293570
  Synthetic oligonucleotide

SEQ ID NO: 657642 - DNA, 60 bp, Artificial; identical to SEQ ID NO: 290038
  Synthetic oligonucleotide

SEQ ID NO: 657643 - DNA, 54 bp, Artificial; identical to SEQ ID NO: 290060
  Synthetic oligonucleotide

SEQ ID NO: 657644 - DNA, 53 bp, Artificial; identical to SEQ ID NO: 293567
  Synthetic oligonucleotide

SEQ ID NO: 657645 - DNA, 54 bp, Artificial; identical to SEQ ID NO: 293096
  Synthetic oligonucleotide

SEQ ID NO: 657646 - DNA, 51 bp, Artificial; identical to SEQ ID NO: 294614
  Synthetic oligonucleotide

SEQ ID NO: 657647 - DNA, 52 bp, Artificial; identical to SEQ ID NO: 294114
  Synthetic oligonucleotide

SEQ ID NO: 657648 - DNA, 52 bp, Artificial; identical to SEQ ID NO: 294113
  Synthetic oligonucleotide

SEQ ID NO: 657649 - DNA, 55 bp, Artificial; identical to SEQ ID NO: 292066
  Synthetic oligonucleotide

SEQ ID NO: 657650 - DNA, 55 bp, Artificial; identical to SEQ ID NO: 290049
  Synthetic oligonucleotide

SEQ ID NO: 657651 - DNA, 51 bp, Artificial; identical to SEQ ID NO: 294625
  Synthetic oligonucleotide

SEQ ID NO: 657652 - DNA, 55 bp, Artificial; identical to SEQ ID NO: 292067
  Synthetic oligonucleotide

SEQ ID NO: 657653 - DNA, 54 bp, Artificial; identical to SEQ ID NO: 293115
  Synthetic oligonucleotide

SEQ ID NO: 657654 - DNA, 55 bp, Artificial; identical to SEQ ID NO: 292070
  Synthetic oligonucleotide

SEQ ID NO: 657655 - DNA, 54 bp, Artificial; identical to SEQ ID NO: 293045
  Synthetic oligonucleotide

SEQ ID NO: 657656 - DNA, 57 bp, Artificial; identical to SEQ ID NO: 289838
  Synthetic oligonucleotide

SEQ ID NO: 657657 - DNA, 53 bp, Artificial; identical to SEQ ID NO: 292073
  Synthetic oligonucleotide

SEQ ID NO: 657658 - DNA, 58 bp, Artificial; identical to SEQ ID NO: 290338
  Synthetic oligonucleotide

SEQ ID NO: 657659 - DNA, 51 bp, Artificial; identical to SEQ ID NO: 294640
  Synthetic oligonucleotide

SEQ ID NO: 657660 - DNA, 52 bp, Artificial; identical to SEQ ID NO: 294046
  Synthetic oligonucleotide

SEQ ID NO: 657661 - DNA, 51 bp, Artificial; identical to SEQ ID NO: 294631
  Synthetic oligonucleotide

SEQ ID NO: 657662 - DNA, 55 bp, Artificial; identical to SEQ ID NO: 292402
  Synthetic oligonucleotide

SEQ ID NO: 657663 - DNA, 55 bp, Artificial; identical to SEQ ID NO: 292403
  Synthetic oligonucleotide

SEQ ID NO: 657664 - DNA, 50 bp, Artificial; identical to SEQ ID NO: 286990
  Synthetic oligonucleotide

SEQ ID NO: 657665 - DNA, 53 bp, Artificial; identical to SEQ ID NO: 293548
  Synthetic oligonucleotide

SEQ ID NO: 657666 - DNA, 52 bp, Artificial; identical to SEQ ID NO: 294035
  Synthetic oligonucleotide

SEQ ID NO: 657667 - DNA, 55 bp, Artificial; identical to SEQ ID NO: 292411
  Synthetic oligonucleotide

SEQ ID NO: 657668 - DNA, 55 bp, Artificial; identical to SEQ ID NO: 292412
  Synthetic oligonucleotide

SEQ ID NO: 657669 - DNA, 60 bp, Artificial; identical to SEQ ID NO: 289382
  Synthetic oligonucleotide

SEQ ID NO: 657670 - DNA, 55 bp, Artificial; identical to SEQ ID NO: 292415
  Synthetic oligonucleotide

SEQ ID NO: 657671 - DNA, 55 bp, Artificial; identical to SEQ ID NO: 292417
  Synthetic oligonucleotide

SEQ ID NO: 657672 - DNA, 51 bp, Artificial; identical to SEQ ID NO: 294550
  Synthetic oligonucleotide

SEQ ID NO: 657673 - DNA, 55 bp, Artificial; identical to SEQ ID NO: 292420
  Synthetic oligonucleotide

SEQ ID NO: 657674 - DNA, 55 bp, Artificial; identical to SEQ ID NO: 292423
  Synthetic oligonucleotide

SEQ ID NO: 657675 - DNA, 55 bp, Artificial; identical to SEQ ID NO: 292424
  Synthetic oligonucleotide

SEQ ID NO: 657676 - DNA, 54 bp, Artificial; identical to SEQ ID NO: 293099
  Synthetic oligonucleotide

SEQ ID NO: 657677 - DNA, 57 bp, Artificial; identical to SEQ ID NO: 296238
  Synthetic oligonucleotide

SEQ ID NO: 657678 - DNA, 55 bp, Artificial; identical to SEQ ID NO: 292428
  Synthetic oligonucleotide

SEQ ID NO: 657679 - DNA, 53 bp, Artificial; identical to SEQ ID NO: 292429
  Synthetic oligonucleotide

SEQ ID NO: 657680 - DNA, 55 bp, Artificial; identical to SEQ ID NO: 292430
  Synthetic oligonucleotide

SEQ ID NO: 657681 - DNA, 54 bp, Artificial; identical to SEQ ID NO: 293076
  Synthetic oligonucleotide

SEQ ID NO: 657682 - DNA, 53 bp, Artificial; identical to SEQ ID NO: 293524
  Synthetic oligonucleotide

SEQ ID NO: 657683 - DNA, 55 bp, Artificial; identical to SEQ ID NO: 291205
  Synthetic oligonucleotide

SEQ ID NO: 657684 - DNA, 55 bp, Artificial; identical to SEQ ID NO: 292432
  Synthetic oligonucleotide

SEQ ID NO: 657685 - DNA, 55 bp, Artificial; identical to SEQ ID NO: 292368
  Synthetic oligonucleotide

SEQ ID NO: 657686 - DNA, 55 bp, Artificial; identical to SEQ ID NO: 292369
  Synthetic oligonucleotide

SEQ ID NO: 657687 - DNA, 50 bp, Artificial; identical to SEQ ID NO: 296673
  Synthetic oligonucleotide

SEQ ID NO: 657688 - DNA, 54 bp, Artificial; identical to SEQ ID NO: 292370
  Synthetic oligonucleotide

SEQ ID NO: 657689 - DNA, 55 bp, Artificial; identical to SEQ ID NO: 292372
  Synthetic oligonucleotide

SEQ ID NO: 657690 - DNA, 51 bp, Artificial; identical to SEQ ID NO: 294745
  Synthetic oligonucleotide

SEQ ID NO: 657691 - DNA, 55 bp, Artificial; identical to SEQ ID NO: 286938
  Synthetic oligonucleotide

SEQ ID NO: 657692 - DNA, 53 bp, Artificial; identical to SEQ ID NO: 292378
  Synthetic oligonucleotide

SEQ ID NO: 657693 - DNA, 55 bp, Artificial; identical to SEQ ID NO: 292380
  Synthetic oligonucleotide

SEQ ID NO: 657694 - DNA, 55 bp, Artificial; identical to SEQ ID NO: 292383
  Synthetic oligonucleotide

SEQ ID NO: 657695 - DNA, 53 bp, Artificial; identical to SEQ ID NO: 293452
  Synthetic oligonucleotide

SEQ ID NO: 657696 - DNA, 54 bp, Artificial; identical to SEQ ID NO: 293036
  Synthetic oligonucleotide

SEQ ID NO: 657697 - DNA, 53 bp, Artificial; identical to SEQ ID NO: 293491
  Synthetic oligonucleotide

SEQ ID NO: 657698 - DNA, 55 bp, Artificial; identical to SEQ ID NO: 292388
  Synthetic oligonucleotide

SEQ ID NO: 657699 - DNA, 60 bp, Artificial; identical to SEQ ID NO: 291016
  Synthetic oligonucleotide

SEQ ID NO: 657700 - DNA, 55 bp, Artificial; identical to SEQ ID NO: 292390
  Synthetic oligonucleotide

SEQ ID NO: 657701 - DNA, 55 bp, Artificial; identical to SEQ ID NO: 292392
  Synthetic oligonucleotide

SEQ ID NO: 657702 - DNA, 59 bp, Artificial; identical to SEQ ID NO: 291138
  Synthetic oligonucleotide

SEQ ID NO: 657703 - DNA, 55 bp, Artificial; identical to SEQ ID NO: 292395
  Synthetic oligonucleotide

SEQ ID NO: 657704 - DNA, 60 bp, Artificial; identical to SEQ ID NO: 291171
  Synthetic oligonucleotide

SEQ ID NO: 657705 - DNA, 60 bp, Artificial; identical to SEQ ID NO: 290983
  Synthetic oligonucleotide

SEQ ID NO: 657706 - DNA, 55 bp, Artificial; identical to SEQ ID NO: 292397
  Synthetic oligonucleotide

SEQ ID NO: 657707 - DNA, 54 bp, Artificial; identical to SEQ ID NO: 293422
  Synthetic oligonucleotide

SEQ ID NO: 657708 - DNA, 51 bp, Artificial; identical to SEQ ID NO: 294694
  Synthetic oligonucleotide

SEQ ID NO: 657709 - DNA, 55 bp, Artificial; identical to SEQ ID NO: 292398
  Synthetic oligonucleotide

SEQ ID NO: 657710 - DNA, 55 bp, Artificial; identical to SEQ ID NO: 292469
  Synthetic oligonucleotide

SEQ ID NO: 657711 - DNA, 55 bp, Artificial; identical to SEQ ID NO: 292470
  Synthetic oligonucleotide

SEQ ID NO: 657712 - DNA, 50 bp, Artificial; identical to SEQ ID NO: 296695
  Synthetic oligonucleotide

SEQ ID NO: 657713 - DNA, 55 bp, Artificial; identical to SEQ ID NO: 292472
  Synthetic oligonucleotide

SEQ ID NO: 657714 - DNA, 54 bp, Artificial; identical to SEQ ID NO: 293418
  Synthetic oligonucleotide

SEQ ID NO: 657715 - DNA, 55 bp, Artificial; identical to SEQ ID NO: 292477
  Synthetic oligonucleotide

SEQ ID NO: 657716 - DNA, 55 bp, Artificial; identical to SEQ ID NO: 292479
  Synthetic oligonucleotide

SEQ ID NO: 657717 - DNA, 55 bp, Artificial; identical to SEQ ID NO: 292483
  Synthetic oligonucleotide

SEQ ID NO: 657718 - DNA, 55 bp, Artificial; identical to SEQ ID NO: 292487
  Synthetic oligonucleotide

SEQ ID NO: 657719 - DNA, 55 bp, Artificial; identical to SEQ ID NO: 292488
  Synthetic oligonucleotide

SEQ ID NO: 657720 - DNA, 54 bp, Artificial; identical to SEQ ID NO: 293354
  Synthetic oligonucleotide

SEQ ID NO: 657721 - DNA, 56 bp, Artificial; identical to SEQ ID NO: 297070
  Synthetic oligonucleotide

SEQ ID NO: 657722 - DNA, 53 bp, Artificial; identical to SEQ ID NO: 293453
  Synthetic oligonucleotide

SEQ ID NO: 657723 - DNA, 54 bp, Artificial; identical to SEQ ID NO: 293392
  Synthetic oligonucleotide

SEQ ID NO: 657724 - DNA, 55 bp, Artificial; identical to SEQ ID NO: 292490
  Synthetic oligonucleotide

SEQ ID NO: 657725 - DNA, 55 bp, Artificial; identical to SEQ ID NO: 292491
  Synthetic oligonucleotide

SEQ ID NO: 657726 - DNA, 55 bp, Artificial; identical to SEQ ID NO: 292492
  Synthetic oligonucleotide

SEQ ID NO: 657727 - DNA, 53 bp, Artificial; identical to SEQ ID NO: 293563
  Synthetic oligonucleotide

SEQ ID NO: 657728 - DNA, 55 bp, Artificial; identical to SEQ ID NO: 292496
  Synthetic oligonucleotide

SEQ ID NO: 657729 - DNA, 55 bp, Artificial; identical to SEQ ID NO: 292497
  Synthetic oligonucleotide

SEQ ID NO: 657730 - DNA, 55 bp, Artificial; identical to SEQ ID NO: 292499
  Synthetic oligonucleotide

SEQ ID NO: 657731 - DNA, 50 bp, Artificial; identical to SEQ ID NO: 296397
  Synthetic oligonucleotide

SEQ ID NO: 657732 - DNA, 52 bp, Artificial; identical to SEQ ID NO: 294145
  Synthetic oligonucleotide

SEQ ID NO: 657733 - DNA, 55 bp, Artificial; identical to SEQ ID NO: 292500
  Synthetic oligonucleotide

SEQ ID NO: 657734 - DNA, 55 bp, Artificial; identical to SEQ ID NO: 292435
  Synthetic oligonucleotide

SEQ ID NO: 657735 - DNA, 55 bp, Artificial; identical to SEQ ID NO: 292437
  Synthetic oligonucleotide

SEQ ID NO: 657736 - DNA, 51 bp, Artificial; identical to SEQ ID NO: 292439
  Synthetic oligonucleotide

SEQ ID NO: 657737 - DNA, 53 bp, Artificial; identical to SEQ ID NO: 293581
  Synthetic oligonucleotide

SEQ ID NO: 657738 - DNA, 54 bp, Artificial; identical to SEQ ID NO: 293385
  Synthetic oligonucleotide

SEQ ID NO: 657739 - DNA, 55 bp, Artificial; identical to SEQ ID NO: 292444
  Synthetic oligonucleotide

SEQ ID NO: 657740 - DNA, 53 bp, Artificial; identical to SEQ ID NO: 293520
  Synthetic oligonucleotide

SEQ ID NO: 657741 - DNA, 52 bp, Artificial; identical to SEQ ID NO: 294136
  Synthetic oligonucleotide

SEQ ID NO: 657742 - DNA, 51 bp, Artificial; identical to SEQ ID NO: 294542
  Synthetic oligonucleotide

SEQ ID NO: 657743 - DNA, 55 bp, Artificial; identical to SEQ ID NO: 292447
  Synthetic oligonucleotide

SEQ ID NO: 657744 - DNA, 55 bp, Artificial; identical to SEQ ID NO: 292448
  Synthetic oligonucleotide

SEQ ID NO: 657745 - DNA, 51 bp, Artificial; identical to SEQ ID NO: 294500
  Synthetic oligonucleotide

SEQ ID NO: 657746 - DNA, 55 bp, Artificial; identical to SEQ ID NO: 292451
  Synthetic oligonucleotide

SEQ ID NO: 657747 - DNA, 50 bp, Artificial; identical to SEQ ID NO: 296540
  Synthetic oligonucleotide

SEQ ID NO: 657748 - DNA, 54 bp, Artificial; identical to SEQ ID NO: 293389
  Synthetic oligonucleotide

SEQ ID NO: 657749 - DNA, 53 bp, Artificial; identical to SEQ ID NO: 293537
  Synthetic oligonucleotide

SEQ ID NO: 657750 - DNA, 50 bp, Artificial; identical to SEQ ID NO: 296579
  Synthetic oligonucleotide

SEQ ID NO: 657751 - DNA, 54 bp, Artificial; identical to SEQ ID NO: 293407
  Synthetic oligonucleotide

SEQ ID NO: 657752 - DNA, 52 bp, Artificial; identical to SEQ ID NO: 294174
  Synthetic oligonucleotide

SEQ ID NO: 657753 - DNA, 55 bp, Artificial; identical to SEQ ID NO: 292456
  Synthetic oligonucleotide

SEQ ID NO: 657754 - DNA, 53 bp, Artificial; identical to SEQ ID NO: 293528
  Synthetic oligonucleotide

SEQ ID NO: 657755 - DNA, 55 bp, Artificial; identical to SEQ ID NO: 292461
  Synthetic oligonucleotide

SEQ ID NO: 657756 - DNA, 52 bp, Artificial; identical to SEQ ID NO: 294161
  Synthetic oligonucleotide

SEQ ID NO: 657757 - DNA, 55 bp, Artificial; identical to SEQ ID NO: 292464
  Synthetic oligonucleotide

SEQ ID NO: 657758 - DNA, 53 bp, Artificial; identical to SEQ ID NO: 292274
  Synthetic oligonucleotide

SEQ ID NO: 657759 - DNA, 51 bp, Artificial; identical to SEQ ID NO: 294432
  Synthetic oligonucleotide

SEQ ID NO: 657760 - DNA, 53 bp, Artificial; identical to SEQ ID NO: 293545
  Synthetic oligonucleotide

SEQ ID NO: 657761 - DNA, 55 bp, Artificial; identical to SEQ ID NO: 292276
  Synthetic oligonucleotide

SEQ ID NO: 657762 - DNA, 55 bp, Artificial; identical to SEQ ID NO: 292277
  Synthetic oligonucleotide

SEQ ID NO: 657763 - DNA, 51 bp, Artificial; identical to SEQ ID NO: 294933
  Synthetic oligonucleotide

SEQ ID NO: 657764 - DNA, 55 bp, Artificial; identical to SEQ ID NO: 287705
  Synthetic oligonucleotide

SEQ ID NO: 657765 - DNA, 57 bp, Artificial; identical to SEQ ID NO: 287694
  Synthetic oligonucleotide

SEQ ID NO: 657766 - DNA, 51 bp, Artificial; identical to SEQ ID NO: 294943
  Synthetic oligonucleotide

SEQ ID NO: 657767 - DNA, 55 bp, Artificial; identical to SEQ ID NO: 292279
  Synthetic oligonucleotide

SEQ ID NO: 657768 - DNA, 55 bp, Artificial; identical to SEQ ID NO: 292280
  Synthetic oligonucleotide

SEQ ID NO: 657769 - DNA, 60 bp, Artificial; identical to SEQ ID NO: 288138
  Synthetic oligonucleotide

SEQ ID NO: 657770 - DNA, 53 bp, Artificial; identical to SEQ ID NO: 293503
  Synthetic oligonucleotide

SEQ ID NO: 657771 - DNA, 55 bp, Artificial; identical to SEQ ID NO: 292283
  Synthetic oligonucleotide

SEQ ID NO: 657772 - DNA, 52 bp, Artificial; identical to SEQ ID NO: 292284
  Synthetic oligonucleotide

SEQ ID NO: 657773 - DNA, 55 bp, Artificial; identical to SEQ ID NO: 292285
  Synthetic oligonucleotide

SEQ ID NO: 657774 - DNA, 55 bp, Artificial; identical to SEQ ID NO: 292286
  Synthetic oligonucleotide

SEQ ID NO: 657775 - DNA, 51 bp, Artificial; identical to SEQ ID NO: 294913
  Synthetic oligonucleotide

SEQ ID NO: 657776 - DNA, 55 bp, Artificial; identical to SEQ ID NO: 292288
  Synthetic oligonucleotide

SEQ ID NO: 657777 - DNA, 55 bp, Artificial; identical to SEQ ID NO: 288105
  Synthetic oligonucleotide

SEQ ID NO: 657778 - DNA, 55 bp, Artificial; identical to SEQ ID NO: 292291
  Synthetic oligonucleotide

SEQ ID NO: 657779 - DNA, 55 bp, Artificial; identical to SEQ ID NO: 292292
  Synthetic oligonucleotide

SEQ ID NO: 657780 - DNA, 55 bp, Artificial; identical to SEQ ID NO: 292295
  Synthetic oligonucleotide

SEQ ID NO: 657781 - DNA, 55 bp, Artificial; identical to SEQ ID NO: 292297
  Synthetic oligonucleotide

SEQ ID NO: 657782 - DNA, 55 bp, Artificial; identical to SEQ ID NO: 292299
  Synthetic oligonucleotide

SEQ ID NO: 657783 - DNA, 52 bp, Artificial; identical to SEQ ID NO: 296104
  Synthetic oligonucleotide

SEQ ID NO: 657784 - DNA, 55 bp, Artificial; identical to SEQ ID NO: 292301
  Synthetic oligonucleotide

SEQ ID NO: 657785 - DNA, 55 bp, Artificial; identical to SEQ ID NO: 292241
  Synthetic oligonucleotide

SEQ ID NO: 657786 - DNA, 52 bp, Artificial; identical to SEQ ID NO: 294013
  Synthetic oligonucleotide

SEQ ID NO: 657787 - DNA, 55 bp, Artificial; identical to SEQ ID NO: 292245
  Synthetic oligonucleotide

SEQ ID NO: 657788 - DNA, 52 bp, Artificial; identical to SEQ ID NO: 293963
  Synthetic oligonucleotide

SEQ ID NO: 657789 - DNA, 58 bp, Artificial; identical to SEQ ID NO: 292615
  Synthetic oligonucleotide

SEQ ID NO: 657790 - DNA, 55 bp, Artificial; identical to SEQ ID NO: 292252
  Synthetic oligonucleotide

SEQ ID NO: 657791 - DNA, 54 bp, Artificial; identical to SEQ ID NO: 293299
  Synthetic oligonucleotide

SEQ ID NO: 657792 - DNA, 53 bp, Artificial; identical to SEQ ID NO: 292083
  Synthetic oligonucleotide

SEQ ID NO: 657793 - DNA, 55 bp, Artificial; identical to SEQ ID NO: 292254
  Synthetic oligonucleotide

SEQ ID NO: 657794 - DNA, 56 bp, Artificial; identical to SEQ ID NO: 296993
  Synthetic oligonucleotide

SEQ ID NO: 657795 - DNA, 55 bp, Artificial; identical to SEQ ID NO: 292256
  Synthetic oligonucleotide

SEQ ID NO: 657796 - DNA, 55 bp, Artificial; identical to SEQ ID NO: 292257
  Synthetic oligonucleotide

SEQ ID NO: 657797 - DNA, 55 bp, Artificial; identical to SEQ ID NO: 292258
  Synthetic oligonucleotide

SEQ ID NO: 657798 - DNA, 55 bp, Artificial; identical to SEQ ID NO: 292261
  Synthetic oligonucleotide

SEQ ID NO: 657799 - DNA, 56 bp, Artificial; identical to SEQ ID NO: 286727
  Synthetic oligonucleotide

SEQ ID NO: 657800 - DNA, 55 bp, Artificial; identical to SEQ ID NO: 292262
  Synthetic oligonucleotide

SEQ ID NO: 657801 - DNA, 57 bp, Artificial; identical to SEQ ID NO: 296915
  Synthetic oligonucleotide

SEQ ID NO: 657802 - DNA, 54 bp, Artificial; identical to SEQ ID NO: 293320
  Synthetic oligonucleotide

SEQ ID NO: 657803 - DNA, 55 bp, Artificial; identical to SEQ ID NO: 292263
  Synthetic oligonucleotide

SEQ ID NO: 657804 - DNA, 50 bp, Artificial; identical to SEQ ID NO: 296880
  Synthetic oligonucleotide

SEQ ID NO: 657805 - DNA, 56 bp, Artificial; identical to SEQ ID NO: 286915
  Synthetic oligonucleotide

SEQ ID NO: 657806 - DNA, 55 bp, Artificial; identical to SEQ ID NO: 292266
  Synthetic oligonucleotide

SEQ ID NO: 657807 - DNA, 55 bp, Artificial; identical to SEQ ID NO: 292267
  Synthetic oligonucleotide

SEQ ID NO: 657808 - DNA, 55 bp, Artificial; identical to SEQ ID NO: 292337
  Synthetic oligonucleotide

SEQ ID NO: 657809 - DNA, 55 bp, Artificial; identical to SEQ ID NO: 292339
  Synthetic oligonucleotide

SEQ ID NO: 657810 - DNA, 50 bp, Artificial; identical to SEQ ID NO: 296977
  Synthetic oligonucleotide

SEQ ID NO: 657811 - DNA, 55 bp, Artificial; identical to SEQ ID NO: 292340
  Synthetic oligonucleotide

SEQ ID NO: 657812 - DNA, 55 bp, Artificial; identical to SEQ ID NO: 292341
  Synthetic oligonucleotide

SEQ ID NO: 657813 - DNA, 55 bp, Artificial; identical to SEQ ID NO: 292342
  Synthetic oligonucleotide

SEQ ID NO: 657814 - DNA, 53 bp, Artificial; identical to SEQ ID NO: 293495
  Synthetic oligonucleotide

SEQ ID NO: 657815 - DNA, 54 bp, Artificial; identical to SEQ ID NO: 293243
  Synthetic oligonucleotide

SEQ ID NO: 657816 - DNA, 50 bp, Artificial; identical to SEQ ID NO: 296988
  Synthetic oligonucleotide

SEQ ID NO: 657817 - DNA, 55 bp, Artificial; identical to SEQ ID NO: 292343
  Synthetic oligonucleotide

SEQ ID NO: 657818 - DNA, 55 bp, Artificial; identical to SEQ ID NO: 292344
  Synthetic oligonucleotide

SEQ ID NO: 657819 - DNA, 55 bp, Artificial; identical to SEQ ID NO: 292345
  Synthetic oligonucleotide

SEQ ID NO: 657820 - DNA, 55 bp, Artificial; identical to SEQ ID NO: 293704
  Synthetic oligonucleotide

SEQ ID NO: 657821 - DNA, 55 bp, Artificial; identical to SEQ ID NO: 292350
  Synthetic oligonucleotide

SEQ ID NO: 657822 - DNA, 53 bp, Artificial; identical to SEQ ID NO: 293474
  Synthetic oligonucleotide

SEQ ID NO: 657823 - DNA, 55 bp, Artificial; identical to SEQ ID NO: 292352
  Synthetic oligonucleotide

SEQ ID NO: 657824 - DNA, 55 bp, Artificial; identical to SEQ ID NO: 292353
  Synthetic oligonucleotide

SEQ ID NO: 657825 - DNA, 55 bp, Artificial; identical to SEQ ID NO: 292355
  Synthetic oligonucleotide

SEQ ID NO: 657826 - DNA, 53 bp, Artificial; identical to SEQ ID NO: 293465
  Synthetic oligonucleotide

SEQ ID NO: 657827 - DNA, 55 bp, Artificial; identical to SEQ ID NO: 292358
  Synthetic oligonucleotide

SEQ ID NO: 657828 - DNA, 55 bp, Artificial; identical to SEQ ID NO: 292359
  Synthetic oligonucleotide

SEQ ID NO: 657829 - DNA, 51 bp, Artificial; identical to SEQ ID NO: 294979
  Synthetic oligonucleotide

SEQ ID NO: 657830 - DNA, 53 bp, Artificial; identical to SEQ ID NO: 293498
  Synthetic oligonucleotide

SEQ ID NO: 657831 - DNA, 55 bp, Artificial; identical to SEQ ID NO: 292363
  Synthetic oligonucleotide

SEQ ID NO: 657832 - DNA, 55 bp, Artificial; identical to SEQ ID NO: 292364
  Synthetic oligonucleotide

SEQ ID NO: 657833 - DNA, 55 bp, Artificial; identical to SEQ ID NO: 292366
  Synthetic oligonucleotide

SEQ ID NO: 657834 - DNA, 57 bp, Artificial; identical to SEQ ID NO: 293937
  Synthetic oligonucleotide

SEQ ID NO: 657835 - DNA, 54 bp, Artificial; identical to SEQ ID NO: 293948
  Synthetic oligonucleotide

SEQ ID NO: 657836 - DNA, 51 bp, Artificial; identical to SEQ ID NO: 294883
  Synthetic oligonucleotide

SEQ ID NO: 657837 - DNA, 54 bp, Artificial; identical to SEQ ID NO: 293319
  Synthetic oligonucleotide

SEQ ID NO: 657838 - DNA, 56 bp, Artificial; identical to SEQ ID NO: 296471
  Synthetic oligonucleotide

SEQ ID NO: 657839 - DNA, 55 bp, Artificial; identical to SEQ ID NO: 292307
  Synthetic oligonucleotide

SEQ ID NO: 657840 - DNA, 52 bp, Artificial; identical to SEQ ID NO: 294250
  Synthetic oligonucleotide

SEQ ID NO: 657841 - DNA, 59 bp, Artificial; identical to SEQ ID NO: 294005
  Synthetic oligonucleotide

SEQ ID NO: 657842 - DNA, 59 bp, Artificial; identical to SEQ ID NO: 294038
  Synthetic oligonucleotide

SEQ ID NO: 657843 - DNA, 54 bp, Artificial; identical to SEQ ID NO: 293284
  Synthetic oligonucleotide

SEQ ID NO: 657844 - DNA, 55 bp, Artificial; identical to SEQ ID NO: 292310
  Synthetic oligonucleotide

SEQ ID NO: 657845 - DNA, 55 bp, Artificial; identical to SEQ ID NO: 292312
  Synthetic oligonucleotide

SEQ ID NO: 657846 - DNA, 50 bp, Artificial; identical to SEQ ID NO: 296865
  Synthetic oligonucleotide

SEQ ID NO: 657847 - DNA, 52 bp, Artificial; identical to SEQ ID NO: 293295
  Synthetic oligonucleotide

SEQ ID NO: 657848 - DNA, 53 bp, Artificial; identical to SEQ ID NO: 292305
  Synthetic oligonucleotide

SEQ ID NO: 657849 - DNA, 55 bp, Artificial; identical to SEQ ID NO: 292318
  Synthetic oligonucleotide

SEQ ID NO: 657850 - DNA, 55 bp, Artificial; identical to SEQ ID NO: 292320
  Synthetic oligonucleotide

SEQ ID NO: 657851 - DNA, 55 bp, Artificial; identical to SEQ ID NO: 292321
  Synthetic oligonucleotide

SEQ ID NO: 657852 - DNA, 52 bp, Artificial; identical to SEQ ID NO: 292516
  Synthetic oligonucleotide

SEQ ID NO: 657853 - DNA, 51 bp, Artificial; identical to SEQ ID NO: 294840
  Synthetic oligonucleotide

SEQ ID NO: 657854 - DNA, 55 bp, Artificial; identical to SEQ ID NO: 292323
  Synthetic oligonucleotide

SEQ ID NO: 657855 - DNA, 51 bp, Artificial; identical to SEQ ID NO: 294850
  Synthetic oligonucleotide

SEQ ID NO: 657856 - DNA, 51 bp, Artificial; identical to SEQ ID NO: 294847
  Synthetic oligonucleotide

SEQ ID NO: 657857 - DNA, 54 bp, Artificial; identical to SEQ ID NO: 293197
  Synthetic oligonucleotide

SEQ ID NO: 657858 - DNA, 51 bp, Artificial; identical to SEQ ID NO: 292324
  Synthetic oligonucleotide

SEQ ID NO: 657859 - DNA, 55 bp, Artificial; identical to SEQ ID NO: 292326
  Synthetic oligonucleotide

SEQ ID NO: 657860 - DNA, 55 bp, Artificial; identical to SEQ ID NO: 292330
  Synthetic oligonucleotide

SEQ ID NO: 657861 - DNA, 53 bp, Artificial; identical to SEQ ID NO: 293508
  Synthetic oligonucleotide

SEQ ID NO: 657862 - DNA, 52 bp, Artificial; identical to SEQ ID NO: 294375
  Synthetic oligonucleotide

SEQ ID NO: 657863 - DNA, 55 bp, Artificial; identical to SEQ ID NO: 292333
  Synthetic oligonucleotide

SEQ ID NO: 657864 - DNA, 55 bp, Artificial; identical to SEQ ID NO: 292334
  Synthetic oligonucleotide

SEQ ID NO: 657865 - DNA, 55 bp, Artificial; identical to SEQ ID NO: 292336
  Synthetic oligonucleotide

SEQ ID NO: 657866 - DNA, 53 bp, Artificial; identical to SEQ ID NO: 293542
  Synthetic oligonucleotide

SEQ ID NO: 657867 - DNA, 55 bp, Artificial; identical to SEQ ID NO: 291618
  Synthetic oligonucleotide

SEQ ID NO: 657868 - DNA, 53 bp, Artificial; identical to SEQ ID NO: 293534
  Synthetic oligonucleotide

SEQ ID NO: 657869 - DNA, 55 bp, Artificial; identical to SEQ ID NO: 292826
  Synthetic oligonucleotide

SEQ ID NO: 657870 - DNA, 55 bp, Artificial; identical to SEQ ID NO: 291621
  Synthetic oligonucleotide

SEQ ID NO: 657871 - DNA, 54 bp, Artificial; identical to SEQ ID NO: 293214
  Synthetic oligonucleotide

SEQ ID NO: 657872 - DNA, 55 bp, Artificial; identical to SEQ ID NO: 291624
  Synthetic oligonucleotide

SEQ ID NO: 657873 - DNA, 53 bp, Artificial; identical to SEQ ID NO: 293533
  Synthetic oligonucleotide

SEQ ID NO: 657874 - DNA, 55 bp, Artificial; identical to SEQ ID NO: 291625
  Synthetic oligonucleotide

SEQ ID NO: 657875 - DNA, 55 bp, Artificial; identical to SEQ ID NO: 291628
  Synthetic oligonucleotide

SEQ ID NO: 657876 - DNA, 53 bp, Artificial; identical to SEQ ID NO: 293406
  Synthetic oligonucleotide

SEQ ID NO: 657877 - DNA, 58 bp, Artificial; identical to SEQ ID NO: 293060
  Synthetic oligonucleotide

SEQ ID NO: 657878 - DNA, 58 bp, Artificial; identical to SEQ ID NO: 292949
  Synthetic oligonucleotide

SEQ ID NO: 657879 - DNA, 51 bp, Artificial; identical to SEQ ID NO: 294526
  Synthetic oligonucleotide

SEQ ID NO: 657880 - DNA, 55 bp, Artificial; identical to SEQ ID NO: 291632
  Synthetic oligonucleotide

SEQ ID NO: 657881 - DNA, 55 bp, Artificial; identical to SEQ ID NO: 291633
  Synthetic oligonucleotide

SEQ ID NO: 657882 - DNA, 60 bp, Artificial; identical to SEQ ID NO: 291949
  Synthetic oligonucleotide

SEQ ID NO: 657883 - DNA, 57 bp, Artificial; identical to SEQ ID NO: 292549
  Synthetic oligonucleotide

SEQ ID NO: 657884 - DNA, 59 bp, Artificial; identical to SEQ ID NO: 292527
  Synthetic oligonucleotide

SEQ ID NO: 657885 - DNA, 55 bp, Artificial; identical to SEQ ID NO: 291634
  Synthetic oligonucleotide

SEQ ID NO: 657886 - DNA, 51 bp, Artificial; identical to SEQ ID NO: 294369
  Synthetic oligonucleotide

SEQ ID NO: 657887 - DNA, 51 bp, Artificial; identical to SEQ ID NO: 294541
  Synthetic oligonucleotide

SEQ ID NO: 657888 - DNA, 53 bp, Artificial; identical to SEQ ID NO: 293507
  Synthetic oligonucleotide

SEQ ID NO: 657889 - DNA, 53 bp, Artificial; identical to SEQ ID NO: 293513
  Synthetic oligonucleotide

SEQ ID NO: 657890 - DNA, 58 bp, Artificial; identical to SEQ ID NO: 294194
  Synthetic oligonucleotide

SEQ ID NO: 657891 - DNA, 58 bp, Artificial; identical to SEQ ID NO: 293416
  Synthetic oligonucleotide

SEQ ID NO: 657892 - DNA, 53 bp, Artificial; identical to SEQ ID NO: 293577
  Synthetic oligonucleotide

SEQ ID NO: 657893 - DNA, 57 bp, Artificial; identical to SEQ ID NO: 293371
  Synthetic oligonucleotide

SEQ ID NO: 657894 - DNA, 53 bp, Artificial; identical to SEQ ID NO: 293578
  Synthetic oligonucleotide

SEQ ID NO: 657895 - DNA, 58 bp, Artificial; identical to SEQ ID NO: 293282
  Synthetic oligonucleotide

SEQ ID NO: 657896 - DNA, 60 bp, Artificial; identical to SEQ ID NO: 293271
  Synthetic oligonucleotide

SEQ ID NO: 657897 - DNA, 54 bp, Artificial; identical to SEQ ID NO: 293381
  Synthetic oligonucleotide

SEQ ID NO: 657898 - DNA, 55 bp, Artificial; identical to SEQ ID NO: 291641
  Synthetic oligonucleotide

SEQ ID NO: 657899 - DNA, 55 bp, Artificial; identical to SEQ ID NO: 291643
  Synthetic oligonucleotide

SEQ ID NO: 657900 - DNA, 55 bp, Artificial; identical to SEQ ID NO: 291644
  Synthetic oligonucleotide

SEQ ID NO: 657901 - DNA, 60 bp, Artificial; identical to SEQ ID NO: 288005
  Synthetic oligonucleotide

SEQ ID NO: 657902 - DNA, 55 bp, Artificial; identical to SEQ ID NO: 291581
  Synthetic oligonucleotide

SEQ ID NO: 657903 - DNA, 51 bp, Artificial; identical to SEQ ID NO: 294481
  Synthetic oligonucleotide

SEQ ID NO: 657904 - DNA, 55 bp, Artificial; identical to SEQ ID NO: 291584
  Synthetic oligonucleotide

SEQ ID NO: 657905 - DNA, 56 bp, Artificial; identical to SEQ ID NO: 295782
  Synthetic oligonucleotide

SEQ ID NO: 657906 - DNA, 59 bp, Artificial; identical to SEQ ID NO: 288127
  Synthetic oligonucleotide

SEQ ID NO: 657907 - DNA, 57 bp, Artificial; identical to SEQ ID NO: 288305
  Synthetic oligonucleotide

SEQ ID NO: 657908 - DNA, 55 bp, Artificial; identical to SEQ ID NO: 291585
  Synthetic oligonucleotide

SEQ ID NO: 657909 - DNA, 50 bp, Artificial; identical to SEQ ID NO: 296474
  Synthetic oligonucleotide

SEQ ID NO: 657910 - DNA, 53 bp, Artificial; identical to SEQ ID NO: 293442
  Synthetic oligonucleotide

SEQ ID NO: 657911 - DNA, 54 bp, Artificial; identical to SEQ ID NO: 293400
  Synthetic oligonucleotide

SEQ ID NO: 657912 - DNA, 55 bp, Artificial; identical to SEQ ID NO: 291586
  Synthetic oligonucleotide

SEQ ID NO: 657913 - DNA, 55 bp, Artificial; identical to SEQ ID NO: 291587
  Synthetic oligonucleotide

SEQ ID NO: 657914 - DNA, 55 bp, Artificial; identical to SEQ ID NO: 291590
  Synthetic oligonucleotide

SEQ ID NO: 657915 - DNA, 55 bp, Artificial; identical to SEQ ID NO: 291591
  Synthetic oligonucleotide

SEQ ID NO: 657916 - DNA, 55 bp, Artificial; identical to SEQ ID NO: 291594
  Synthetic oligonucleotide

SEQ ID NO: 657917 - DNA, 52 bp, Artificial; identical to SEQ ID NO: 294304
  Synthetic oligonucleotide

SEQ ID NO: 657918 - DNA, 52 bp, Artificial; identical to SEQ ID NO: 291598
  Synthetic oligonucleotide

SEQ ID NO: 657919 - DNA, 54 bp, Artificial; identical to SEQ ID NO: 293396
  Synthetic oligonucleotide

SEQ ID NO: 657920 - DNA, 55 bp, Artificial; identical to SEQ ID NO: 291599
  Synthetic oligonucleotide

SEQ ID NO: 657921 - DNA, 55 bp, Artificial; identical to SEQ ID NO: 291600
  Synthetic oligonucleotide

SEQ ID NO: 657922 - DNA, 54 bp, Artificial; identical to SEQ ID NO: 291601
  Synthetic oligonucleotide

SEQ ID NO: 657923 - DNA, 50 bp, Artificial; identical to SEQ ID NO: 296776
  Synthetic oligonucleotide

SEQ ID NO: 657924 - DNA, 55 bp, Artificial; identical to SEQ ID NO: 287727
  Synthetic oligonucleotide

SEQ ID NO: 657925 - DNA, 58 bp, Artificial; identical to SEQ ID NO: 287783
  Synthetic oligonucleotide

SEQ ID NO: 657926 - DNA, 58 bp, Artificial; identical to SEQ ID NO: 287838
  Synthetic oligonucleotide

SEQ ID NO: 657927 - DNA, 55 bp, Artificial; identical to SEQ ID NO: 291603
  Synthetic oligonucleotide

SEQ ID NO: 657928 - DNA, 55 bp, Artificial; identical to SEQ ID NO: 291607
  Synthetic oligonucleotide

SEQ ID NO: 657929 - DNA, 54 bp, Artificial; identical to SEQ ID NO: 292974
  Synthetic oligonucleotide

SEQ ID NO: 657930 - DNA, 55 bp, Artificial; identical to SEQ ID NO: 291609
  Synthetic oligonucleotide

SEQ ID NO: 657931 - DNA, 56 bp, Artificial; identical to SEQ ID NO: 288727
  Synthetic oligonucleotide

SEQ ID NO: 657932 - DNA, 55 bp, Artificial; identical to SEQ ID NO: 291611
  Synthetic oligonucleotide

SEQ ID NO: 657933 - DNA, 51 bp, Artificial; identical to SEQ ID NO: 294743
  Synthetic oligonucleotide

SEQ ID NO: 657934 - DNA, 51 bp, Artificial; identical to SEQ ID NO: 294744
  Synthetic oligonucleotide

SEQ ID NO: 657935 - DNA, 51 bp, Artificial; identical to SEQ ID NO: 294750
  Synthetic oligonucleotide

SEQ ID NO: 657936 - DNA, 55 bp, Artificial; identical to SEQ ID NO: 291681
  Synthetic oligonucleotide

SEQ ID NO: 657937 - DNA, 55 bp, Artificial; identical to SEQ ID NO: 291683
  Synthetic oligonucleotide

SEQ ID NO: 657938 - DNA, 55 bp, Artificial; identical to SEQ ID NO: 291684
  Synthetic oligonucleotide

SEQ ID NO: 657939 - DNA, 54 bp, Artificial; identical to SEQ ID NO: 293075
  Synthetic oligonucleotide

SEQ ID NO: 657940 - DNA, 58 bp, Artificial; identical to SEQ ID NO: 288916
  Synthetic oligonucleotide

SEQ ID NO: 657941 - DNA, 52 bp, Artificial; identical to SEQ ID NO: 294270
  Synthetic oligonucleotide

SEQ ID NO: 657942 - DNA, 57 bp, Artificial; identical to SEQ ID NO: 296593
  Synthetic oligonucleotide

SEQ ID NO: 657943 - DNA, 55 bp, Artificial; identical to SEQ ID NO: 291687
  Synthetic oligonucleotide

SEQ ID NO: 657944 - DNA, 55 bp, Artificial; identical to SEQ ID NO: 291688
  Synthetic oligonucleotide

SEQ ID NO: 657945 - DNA, 55 bp, Artificial; identical to SEQ ID NO: 291689
  Synthetic oligonucleotide

SEQ ID NO: 657946 - DNA, 58 bp, Artificial; identical to SEQ ID NO: 295849
  Synthetic oligonucleotide

SEQ ID NO: 657947 - DNA, 55 bp, Artificial; identical to SEQ ID NO: 291692
  Synthetic oligonucleotide

SEQ ID NO: 657948 - DNA, 58 bp, Artificial; identical to SEQ ID NO: 288650
  Synthetic oligonucleotide

SEQ ID NO: 657949 - DNA, 60 bp, Artificial; identical to SEQ ID NO: 288661
  Synthetic oligonucleotide

SEQ ID NO: 657950 - DNA, 55 bp, Artificial; identical to SEQ ID NO: 291694
  Synthetic oligonucleotide

SEQ ID NO: 657951 - DNA, 55 bp, Artificial; identical to SEQ ID NO: 291696
  Synthetic oligonucleotide

SEQ ID NO: 657952 - DNA, 55 bp, Artificial; identical to SEQ ID NO: 291698
  Synthetic oligonucleotide

SEQ ID NO: 657953 - DNA, 52 bp, Artificial; identical to SEQ ID NO: 294359
  Synthetic oligonucleotide

SEQ ID NO: 657954 - DNA, 50 bp, Artificial; identical to SEQ ID NO: 287006
  Synthetic oligonucleotide

SEQ ID NO: 657955 - DNA, 55 bp, Artificial; identical to SEQ ID NO: 291699
  Synthetic oligonucleotide

SEQ ID NO: 657956 - DNA, 53 bp, Artificial; identical to SEQ ID NO: 293519
  Synthetic oligonucleotide

SEQ ID NO: 657957 - DNA, 56 bp, Artificial; identical to SEQ ID NO: 288182
  Synthetic oligonucleotide

SEQ ID NO: 657958 - DNA, 54 bp, Artificial; identical to SEQ ID NO: 293145
  Synthetic oligonucleotide

SEQ ID NO: 657959 - DNA, 55 bp, Artificial; identical to SEQ ID NO: 291703
  Synthetic oligonucleotide

SEQ ID NO: 657960 - DNA, 55 bp, Artificial; identical to SEQ ID NO: 291705
  Synthetic oligonucleotide

SEQ ID NO: 657961 - DNA, 51 bp, Artificial; identical to SEQ ID NO: 294618
  Synthetic oligonucleotide

SEQ ID NO: 657962 - DNA, 55 bp, Artificial; identical to SEQ ID NO: 291706
  Synthetic oligonucleotide

SEQ ID NO: 657963 - DNA, 50 bp, Artificial; identical to SEQ ID NO: 287265
  Synthetic oligonucleotide

SEQ ID NO: 657964 - DNA, 53 bp, Artificial; identical to SEQ ID NO: 293447
  Synthetic oligonucleotide

SEQ ID NO: 657965 - DNA, 57 bp, Artificial; identical to SEQ ID NO: 287406
  Synthetic oligonucleotide

SEQ ID NO: 657966 - DNA, 52 bp, Artificial; identical to SEQ ID NO: 294364
  Synthetic oligonucleotide

SEQ ID NO: 657967 - DNA, 50 bp, Artificial; identical to SEQ ID NO: 287281
  Synthetic oligonucleotide

SEQ ID NO: 657968 - DNA, 53 bp, Artificial; identical to SEQ ID NO: 293448
  Synthetic oligonucleotide

SEQ ID NO: 657969 - DNA, 55 bp, Artificial; identical to SEQ ID NO: 291707
  Synthetic oligonucleotide

SEQ ID NO: 657970 - DNA, 56 bp, Artificial; identical to SEQ ID NO: 287082
  Synthetic oligonucleotide

SEQ ID NO: 657971 - DNA, 51 bp, Artificial; identical to SEQ ID NO: 294563
  Synthetic oligonucleotide

SEQ ID NO: 657972 - DNA, 60 bp, Artificial; identical to SEQ ID NO: 287472
  Synthetic oligonucleotide

SEQ ID NO: 657973 - DNA, 60 bp, Artificial; identical to SEQ ID NO: 287450
  Synthetic oligonucleotide

SEQ ID NO: 657974 - DNA, 55 bp, Artificial; identical to SEQ ID NO: 291709
  Synthetic oligonucleotide

SEQ ID NO: 657975 - DNA, 51 bp, Artificial; identical to SEQ ID NO: 294724
  Synthetic oligonucleotide

SEQ ID NO: 657976 - DNA, 55 bp, Artificial; identical to SEQ ID NO: 291710
  Synthetic oligonucleotide

SEQ ID NO: 657977 - DNA, 53 bp, Artificial; identical to SEQ ID NO: 295071
  Synthetic oligonucleotide

SEQ ID NO: 657978 - DNA, 55 bp, Artificial; identical to SEQ ID NO: 291711
  Synthetic oligonucleotide

SEQ ID NO: 657979 - DNA, 53 bp, Artificial; identical to SEQ ID NO: 293457
  Synthetic oligonucleotide

SEQ ID NO: 657980 - DNA, 52 bp, Artificial; identical to SEQ ID NO: 294287
  Synthetic oligonucleotide

SEQ ID NO: 657981 - DNA, 56 bp, Artificial; identical to SEQ ID NO: 297104
  Synthetic oligonucleotide

SEQ ID NO: 657982 - DNA, 53 bp, Artificial; identical to SEQ ID NO: 293463
  Synthetic oligonucleotide

SEQ ID NO: 657983 - DNA, 55 bp, Artificial; identical to SEQ ID NO: 291648
  Synthetic oligonucleotide

SEQ ID NO: 657984 - DNA, 55 bp, Artificial; identical to SEQ ID NO: 291651
  Synthetic oligonucleotide

SEQ ID NO: 657985 - DNA, 51 bp, Artificial; identical to SEQ ID NO: 294736
  Synthetic oligonucleotide

SEQ ID NO: 657986 - DNA, 52 bp, Artificial; identical to SEQ ID NO: 294319
  Synthetic oligonucleotide

SEQ ID NO: 657987 - DNA, 58 bp, Artificial; identical to SEQ ID NO: 291038
  Synthetic oligonucleotide

SEQ ID NO: 657988 - DNA, 55 bp, Artificial; identical to SEQ ID NO: 291657
  Synthetic oligonucleotide

SEQ ID NO: 657989 - DNA, 52 bp, Artificial; identical to SEQ ID NO: 294301
  Synthetic oligonucleotide

SEQ ID NO: 657990 - DNA, 59 bp, Artificial; identical to SEQ ID NO: 290504
  Synthetic oligonucleotide

SEQ ID NO: 657991 - DNA, 56 bp, Artificial; identical to SEQ ID NO: 286738
  Synthetic oligonucleotide

SEQ ID NO: 657992 - DNA, 55 bp, Artificial; identical to SEQ ID NO: 291662
  Synthetic oligonucleotide

SEQ ID NO: 657993 - DNA, 55 bp, Artificial; identical to SEQ ID NO: 291663
  Synthetic oligonucleotide

SEQ ID NO: 657994 - DNA, 55 bp, Artificial; identical to SEQ ID NO: 291664
  Synthetic oligonucleotide

SEQ ID NO: 657995 - DNA, 55 bp, Artificial; identical to SEQ ID NO: 291667
  Synthetic oligonucleotide

SEQ ID NO: 657996 - DNA, 54 bp, Artificial; identical to SEQ ID NO: 291668
  Synthetic oligonucleotide

SEQ ID NO: 657997 - DNA, 55 bp, Artificial; identical to SEQ ID NO: 291669
  Synthetic oligonucleotide

SEQ ID NO: 657998 - DNA, 55 bp, Artificial; identical to SEQ ID NO: 291670
  Synthetic oligonucleotide

SEQ ID NO: 657999 - DNA, 54 bp, Artificial; identical to SEQ ID NO: 291673
  Synthetic oligonucleotide

SEQ ID NO: 658000 - DNA, 57 bp, Artificial; identical to SEQ ID NO: 290683
  Synthetic oligonucleotide

SEQ ID NO: 658001 - DNA, 50 bp, Artificial; identical to SEQ ID NO: 286663
  Synthetic oligonucleotide

SEQ ID NO: 658002 - DNA, 55 bp, Artificial; identical to SEQ ID NO: 291674
  Synthetic oligonucleotide

SEQ ID NO: 658003 - DNA, 54 bp, Artificial; identical to SEQ ID NO: 290739
  Synthetic oligonucleotide

SEQ ID NO: 658004 - DNA, 51 bp, Artificial; identical to SEQ ID NO: 297015
  Synthetic oligonucleotide

SEQ ID NO: 658005 - DNA, 51 bp, Artificial; identical to SEQ ID NO: 294543
  Synthetic oligonucleotide

SEQ ID NO: 658006 - DNA, 53 bp, Artificial; identical to SEQ ID NO: 291677
  Synthetic oligonucleotide

SEQ ID NO: 658007 - DNA, 51 bp, Artificial; identical to SEQ ID NO: 291679
  Synthetic oligonucleotide

SEQ ID NO: 658008 - DNA, 55 bp, Artificial; identical to SEQ ID NO: 291483
  Synthetic oligonucleotide

SEQ ID NO: 658009 - DNA, 55 bp, Artificial; identical to SEQ ID NO: 291486
  Synthetic oligonucleotide

SEQ ID NO: 658010 - DNA, 53 bp, Artificial; identical to SEQ ID NO: 293909
  Synthetic oligonucleotide

SEQ ID NO: 658011 - DNA, 55 bp, Artificial; identical to SEQ ID NO: 291491
  Synthetic oligonucleotide

SEQ ID NO: 658012 - DNA, 53 bp, Artificial; identical to SEQ ID NO: 291794
  Synthetic oligonucleotide

SEQ ID NO: 658013 - DNA, 53 bp, Artificial; identical to SEQ ID NO: 291783
  Synthetic oligonucleotide

SEQ ID NO: 658014 - DNA, 53 bp, Artificial; identical to SEQ ID NO: 291750
  Synthetic oligonucleotide

SEQ ID NO: 658015 - DNA, 58 bp, Artificial; identical to SEQ ID NO: 291739
  Synthetic oligonucleotide

SEQ ID NO: 658016 - DNA, 55 bp, Artificial; identical to SEQ ID NO: 291497
  Synthetic oligonucleotide

SEQ ID NO: 658017 - DNA, 55 bp, Artificial; identical to SEQ ID NO: 294738
  Synthetic oligonucleotide

SEQ ID NO: 658018 - DNA, 54 bp, Artificial; identical to SEQ ID NO: 293053
  Synthetic oligonucleotide

SEQ ID NO: 658019 - DNA, 55 bp, Artificial; identical to SEQ ID NO: 291505
  Synthetic oligonucleotide

SEQ ID NO: 658020 - DNA, 51 bp, Artificial; identical to SEQ ID NO: 295005
  Synthetic oligonucleotide

SEQ ID NO: 658021 - DNA, 55 bp, Artificial; identical to SEQ ID NO: 291510
  Synthetic oligonucleotide

SEQ ID NO: 658022 - DNA, 55 bp, Artificial; identical to SEQ ID NO: 291511
  Synthetic oligonucleotide

SEQ ID NO: 658023 - DNA, 51 bp, Artificial; identical to SEQ ID NO: 294791
  Synthetic oligonucleotide

SEQ ID NO: 658024 - DNA, 53 bp, Artificial; identical to SEQ ID NO: 293787
  Synthetic oligonucleotide

SEQ ID NO: 658025 - DNA, 52 bp, Artificial; identical to SEQ ID NO: 294284
  Synthetic oligonucleotide

SEQ ID NO: 658026 - DNA, 58 bp, Artificial; identical to SEQ ID NO: 295671
  Synthetic oligonucleotide

SEQ ID NO: 658027 - DNA, 53 bp, Artificial; identical to SEQ ID NO: 293800
  Synthetic oligonucleotide

SEQ ID NO: 658028 - DNA, 55 bp, Artificial; identical to SEQ ID NO: 291457
  Synthetic oligonucleotide

SEQ ID NO: 658029 - DNA, 55 bp, Artificial; identical to SEQ ID NO: 291458
  Synthetic oligonucleotide

SEQ ID NO: 658030 - DNA, 51 bp, Artificial; identical to SEQ ID NO: 294835
  Synthetic oligonucleotide

SEQ ID NO: 658031 - DNA, 53 bp, Artificial; identical to SEQ ID NO: 293807
  Synthetic oligonucleotide

SEQ ID NO: 658032 - DNA, 55 bp, Artificial; identical to SEQ ID NO: 291461
  Synthetic oligonucleotide

SEQ ID NO: 658033 - DNA, 55 bp, Artificial; identical to SEQ ID NO: 291465
  Synthetic oligonucleotide

SEQ ID NO: 658034 - DNA, 55 bp, Artificial; identical to SEQ ID NO: 291467
  Synthetic oligonucleotide

SEQ ID NO: 658035 - DNA, 55 bp, Artificial; identical to SEQ ID NO: 291469
  Synthetic oligonucleotide

SEQ ID NO: 658036 - DNA, 51 bp, Artificial; identical to SEQ ID NO: 294797
  Synthetic oligonucleotide

SEQ ID NO: 658037 - DNA, 55 bp, Artificial; identical to SEQ ID NO: 291472
  Synthetic oligonucleotide

SEQ ID NO: 658038 - DNA, 55 bp, Artificial; identical to SEQ ID NO: 291473
  Synthetic oligonucleotide

SEQ ID NO: 658039 - DNA, 53 bp, Artificial; identical to SEQ ID NO: 293903
  Synthetic oligonucleotide

SEQ ID NO: 658040 - DNA, 51 bp, Artificial; identical to SEQ ID NO: 294881
  Synthetic oligonucleotide

SEQ ID NO: 658041 - DNA, 58 bp, Artificial; identical to SEQ ID NO: 295493
  Synthetic oligonucleotide

SEQ ID NO: 658042 - DNA, 52 bp, Artificial; identical to SEQ ID NO: 294235
  Synthetic oligonucleotide

SEQ ID NO: 658043 - DNA, 55 bp, Artificial; identical to SEQ ID NO: 291475
  Synthetic oligonucleotide

SEQ ID NO: 658044 - DNA, 55 bp, Artificial; identical to SEQ ID NO: 291480
  Synthetic oligonucleotide

SEQ ID NO: 658045 - DNA, 50 bp, Artificial; identical to SEQ ID NO: 286765
  Synthetic oligonucleotide

SEQ ID NO: 658046 - DNA, 55 bp, Artificial; identical to SEQ ID NO: 291554
  Synthetic oligonucleotide

SEQ ID NO: 658047 - DNA, 55 bp, Artificial; identical to SEQ ID NO: 291555
  Synthetic oligonucleotide

SEQ ID NO: 658048 - DNA, 55 bp, Artificial; identical to SEQ ID NO: 291556
  Synthetic oligonucleotide

SEQ ID NO: 658049 - DNA, 55 bp, Artificial; identical to SEQ ID NO: 291558
  Synthetic oligonucleotide

SEQ ID NO: 658050 - DNA, 55 bp, Artificial; identical to SEQ ID NO: 291559
  Synthetic oligonucleotide

SEQ ID NO: 658051 - DNA, 55 bp, Artificial; identical to SEQ ID NO: 291561
  Synthetic oligonucleotide

SEQ ID NO: 658052 - DNA, 55 bp, Artificial; identical to SEQ ID NO: 291562
  Synthetic oligonucleotide

SEQ ID NO: 658053 - DNA, 55 bp, Artificial; identical to SEQ ID NO: 291563
  Synthetic oligonucleotide

SEQ ID NO: 658054 - DNA, 55 bp, Artificial; identical to SEQ ID NO: 291568
  Synthetic oligonucleotide

SEQ ID NO: 658055 - DNA, 55 bp, Artificial; identical to SEQ ID NO: 291569
  Synthetic oligonucleotide

SEQ ID NO: 658056 - DNA, 51 bp, Artificial; identical to SEQ ID NO: 294902
  Synthetic oligonucleotide

SEQ ID NO: 658057 - DNA, 53 bp, Artificial; identical to SEQ ID NO: 293666
  Synthetic oligonucleotide

SEQ ID NO: 658058 - DNA, 55 bp, Artificial; identical to SEQ ID NO: 291577
  Synthetic oligonucleotide

SEQ ID NO: 658059 - DNA, 51 bp, Artificial; identical to SEQ ID NO: 294765
  Synthetic oligonucleotide

SEQ ID NO: 658060 - DNA, 51 bp, Artificial; identical to SEQ ID NO: 294801
  Synthetic oligonucleotide

SEQ ID NO: 658061 - DNA, 55 bp, Artificial; identical to SEQ ID NO: 291579
  Synthetic oligonucleotide

SEQ ID NO: 658062 - DNA, 55 bp, Artificial; identical to SEQ ID NO: 291580
  Synthetic oligonucleotide

SEQ ID NO: 658063 - DNA, 55 bp, Artificial; identical to SEQ ID NO: 291514
  Synthetic oligonucleotide

SEQ ID NO: 658064 - DNA, 55 bp, Artificial; identical to SEQ ID NO: 291517
  Synthetic oligonucleotide

SEQ ID NO: 658065 - DNA, 55 bp, Artificial; identical to SEQ ID NO: 291519
  Synthetic oligonucleotide

SEQ ID NO: 658066 - DNA, 50 bp, Artificial; identical to SEQ ID NO: 295262
  Synthetic oligonucleotide

SEQ ID NO: 658067 - DNA, 55 bp, Artificial; identical to SEQ ID NO: 291520
  Synthetic oligonucleotide

SEQ ID NO: 658068 - DNA, 55 bp, Artificial; identical to SEQ ID NO: 291521
  Synthetic oligonucleotide

SEQ ID NO: 658069 - DNA, 53 bp, Artificial; identical to SEQ ID NO: 293687
  Synthetic oligonucleotide

SEQ ID NO: 658070 - DNA, 55 bp, Artificial; identical to SEQ ID NO: 291523
  Synthetic oligonucleotide

SEQ ID NO: 658071 - DNA, 55 bp, Artificial; identical to SEQ ID NO: 291524
  Synthetic oligonucleotide

SEQ ID NO: 658072 - DNA, 51 bp, Artificial; identical to SEQ ID NO: 294770
  Synthetic oligonucleotide

SEQ ID NO: 658073 - DNA, 55 bp, Artificial; identical to SEQ ID NO: 291525
  Synthetic oligonucleotide

SEQ ID NO: 658074 - DNA, 54 bp, Artificial; identical to SEQ ID NO: 293046
  Synthetic oligonucleotide

SEQ ID NO: 658075 - DNA, 55 bp, Artificial; identical to SEQ ID NO: 291528
  Synthetic oligonucleotide

SEQ ID NO: 658076 - DNA, 55 bp, Artificial; identical to SEQ ID NO: 291530
  Synthetic oligonucleotide

SEQ ID NO: 658077 - DNA, 50 bp, Artificial; identical to SEQ ID NO: 295243
  Synthetic oligonucleotide

SEQ ID NO: 658078 - DNA, 55 bp, Artificial; identical to SEQ ID NO: 291534
  Synthetic oligonucleotide

SEQ ID NO: 658079 - DNA, 51 bp, Artificial; identical to SEQ ID NO: 294897
  Synthetic oligonucleotide

SEQ ID NO: 658080 - DNA, 52 bp, Artificial; identical to SEQ ID NO: 294381
  Synthetic oligonucleotide

SEQ ID NO: 658081 - DNA, 55 bp, Artificial; identical to SEQ ID NO: 291539
  Synthetic oligonucleotide

SEQ ID NO: 658082 - DNA, 55 bp, Artificial; identical to SEQ ID NO: 291540
  Synthetic oligonucleotide

SEQ ID NO: 658083 - DNA, 55 bp, Artificial; identical to SEQ ID NO: 291543
  Synthetic oligonucleotide

SEQ ID NO: 658084 - DNA, 55 bp, Artificial; identical to SEQ ID NO: 291545
  Synthetic oligonucleotide

SEQ ID NO: 658085 - DNA, 55 bp, Artificial; identical to SEQ ID NO: 291546
  Synthetic oligonucleotide

SEQ ID NO: 658086 - DNA, 52 bp, Artificial; identical to SEQ ID NO: 291884
  Synthetic oligonucleotide

SEQ ID NO: 658087 - DNA, 55 bp, Artificial; identical to SEQ ID NO: 291885
  Synthetic oligonucleotide

SEQ ID NO: 658088 - DNA, 55 bp, Artificial; identical to SEQ ID NO: 291887
  Synthetic oligonucleotide

SEQ ID NO: 658089 - DNA, 58 bp, Artificial; identical to SEQ ID NO: 289949
  Synthetic oligonucleotide

SEQ ID NO: 658090 - DNA, 55 bp, Artificial; identical to SEQ ID NO: 291891
  Synthetic oligonucleotide

SEQ ID NO: 658091 - DNA, 51 bp, Artificial; identical to SEQ ID NO: 294679
  Synthetic oligonucleotide

SEQ ID NO: 658092 - DNA, 55 bp, Artificial; identical to SEQ ID NO: 291896
  Synthetic oligonucleotide

SEQ ID NO: 658093 - DNA, 55 bp, Artificial; identical to SEQ ID NO: 291900
  Synthetic oligonucleotide

SEQ ID NO: 658094 - DNA, 55 bp, Artificial; identical to SEQ ID NO: 291901
  Synthetic oligonucleotide

SEQ ID NO: 658095 - DNA, 51 bp, Artificial; identical to SEQ ID NO: 294699
  Synthetic oligonucleotide

SEQ ID NO: 658096 - DNA, 55 bp, Artificial; identical to SEQ ID NO: 291902
  Synthetic oligonucleotide

SEQ ID NO: 658097 - DNA, 55 bp, Artificial; identical to SEQ ID NO: 291906
  Synthetic oligonucleotide

SEQ ID NO: 658098 - DNA, 60 bp, Artificial; identical to SEQ ID NO: 290305
  Synthetic oligonucleotide

SEQ ID NO: 658099 - DNA, 55 bp, Artificial; identical to SEQ ID NO: 291908
  Synthetic oligonucleotide

SEQ ID NO: 658100 - DNA, 53 bp, Artificial; identical to SEQ ID NO: 293758
  Synthetic oligonucleotide

SEQ ID NO: 658101 - DNA, 55 bp, Artificial; identical to SEQ ID NO: 291909
  Synthetic oligonucleotide

SEQ ID NO: 658102 - DNA, 53 bp, Artificial; identical to SEQ ID NO: 293744
  Synthetic oligonucleotide

SEQ ID NO: 658103 - DNA, 55 bp, Artificial; identical to SEQ ID NO: 291851
  Synthetic oligonucleotide

SEQ ID NO: 658104 - DNA, 55 bp, Artificial; identical to SEQ ID NO: 291854
  Synthetic oligonucleotide

SEQ ID NO: 658105 - DNA, 55 bp, Artificial; identical to SEQ ID NO: 291855
  Synthetic oligonucleotide

SEQ ID NO: 658106 - DNA, 55 bp, Artificial; identical to SEQ ID NO: 291856
  Synthetic oligonucleotide

SEQ ID NO: 658107 - DNA, 60 bp, Artificial; identical to SEQ ID NO: 290238
  Synthetic oligonucleotide

SEQ ID NO: 658108 - DNA, 52 bp, Artificial; identical to SEQ ID NO: 294397
  Synthetic oligonucleotide

SEQ ID NO: 658109 - DNA, 51 bp, Artificial; identical to SEQ ID NO: 294553
  Synthetic oligonucleotide

SEQ ID NO: 658110 - DNA, 57 bp, Artificial; identical to SEQ ID NO: 296048
  Synthetic oligonucleotide

SEQ ID NO: 658111 - DNA, 51 bp, Artificial; identical to SEQ ID NO: 294557
  Synthetic oligonucleotide

SEQ ID NO: 658112 - DNA, 51 bp, Artificial; identical to SEQ ID NO: 294569
  Synthetic oligonucleotide

SEQ ID NO: 658113 - DNA, 55 bp, Artificial; identical to SEQ ID NO: 291865
  Synthetic oligonucleotide

SEQ ID NO: 658114 - DNA, 53 bp, Artificial; identical to SEQ ID NO: 293769
  Synthetic oligonucleotide

SEQ ID NO: 658115 - DNA, 50 bp, Artificial; identical to SEQ ID NO: 295133
  Synthetic oligonucleotide

SEQ ID NO: 658116 - DNA, 54 bp, Artificial; identical to SEQ ID NO: 293339
  Synthetic oligonucleotide

SEQ ID NO: 658117 - DNA, 55 bp, Artificial; identical to SEQ ID NO: 291870
  Synthetic oligonucleotide

SEQ ID NO: 658118 - DNA, 55 bp, Artificial; identical to SEQ ID NO: 291875
  Synthetic oligonucleotide

SEQ ID NO: 658119 - DNA, 55 bp, Artificial; identical to SEQ ID NO: 291876
  Synthetic oligonucleotide

SEQ ID NO: 658120 - DNA, 55 bp, Artificial; identical to SEQ ID NO: 291877
  Synthetic oligonucleotide

SEQ ID NO: 658121 - DNA, 57 bp, Artificial; identical to SEQ ID NO: 295904
  Synthetic oligonucleotide

SEQ ID NO: 658122 - DNA, 55 bp, Artificial; identical to SEQ ID NO: 291945
  Synthetic oligonucleotide

SEQ ID NO: 658123 - DNA, 55 bp, Artificial; identical to SEQ ID NO: 291947
  Synthetic oligonucleotide

SEQ ID NO: 658124 - DNA, 54 bp, Artificial; identical to SEQ ID NO: 293435
  Synthetic oligonucleotide

SEQ ID NO: 658125 - DNA, 60 bp, Artificial; identical to SEQ ID NO: 289349
  Synthetic oligonucleotide

SEQ ID NO: 658126 - DNA, 55 bp, Artificial; identical to SEQ ID NO: 291948
  Synthetic oligonucleotide

SEQ ID NO: 658127 - DNA, 59 bp, Artificial; identical to SEQ ID NO: 294582
  Synthetic oligonucleotide

SEQ ID NO: 658128 - DNA, 55 bp, Artificial; identical to SEQ ID NO: 291950
  Synthetic oligonucleotide

SEQ ID NO: 658129 - DNA, 50 bp, Artificial; identical to SEQ ID NO: 295984
  Synthetic oligonucleotide

SEQ ID NO: 658130 - DNA, 52 bp, Artificial; identical to SEQ ID NO: 294403
  Synthetic oligonucleotide

SEQ ID NO: 658131 - DNA, 55 bp, Artificial; identical to SEQ ID NO: 291953
  Synthetic oligonucleotide

SEQ ID NO: 658132 - DNA, 54 bp, Artificial; identical to SEQ ID NO: 296793
  Synthetic oligonucleotide

SEQ ID NO: 658133 - DNA, 55 bp, Artificial; identical to SEQ ID NO: 291958
  Synthetic oligonucleotide

SEQ ID NO: 658134 - DNA, 55 bp, Artificial; identical to SEQ ID NO: 291959
  Synthetic oligonucleotide

SEQ ID NO: 658135 - DNA, 55 bp, Artificial; identical to SEQ ID NO: 291962
  Synthetic oligonucleotide

SEQ ID NO: 658136 - DNA, 55 bp, Artificial; identical to SEQ ID NO: 291963
  Synthetic oligonucleotide

SEQ ID NO: 658137 - DNA, 51 bp, Artificial; identical to SEQ ID NO: 294719
  Synthetic oligonucleotide

SEQ ID NO: 658138 - DNA, 55 bp, Artificial; identical to SEQ ID NO: 291966
  Synthetic oligonucleotide

SEQ ID NO: 658139 - DNA, 55 bp, Artificial; identical to SEQ ID NO: 291967
  Synthetic oligonucleotide

SEQ ID NO: 658140 - DNA, 60 bp, Artificial; identical to SEQ ID NO: 289594
  Synthetic oligonucleotide

SEQ ID NO: 658141 - DNA, 55 bp, Artificial; identical to SEQ ID NO: 291969
  Synthetic oligonucleotide

SEQ ID NO: 658142 - DNA, 56 bp, Artificial; identical to SEQ ID NO: 289616
  Synthetic oligonucleotide

SEQ ID NO: 658143 - DNA, 55 bp, Artificial; identical to SEQ ID NO: 291976
  Synthetic oligonucleotide

SEQ ID NO: 658144 - DNA, 55 bp, Artificial; identical to SEQ ID NO: 291977
  Synthetic oligonucleotide

SEQ ID NO: 658145 - DNA, 55 bp, Artificial; identical to SEQ ID NO: 291911
  Synthetic oligonucleotide

SEQ ID NO: 658146 - DNA, 55 bp, Artificial; identical to SEQ ID NO: 291912
  Synthetic oligonucleotide

SEQ ID NO: 658147 - DNA, 55 bp, Artificial; identical to SEQ ID NO: 291914
  Synthetic oligonucleotide

SEQ ID NO: 658148 - DNA, 55 bp, Artificial; identical to SEQ ID NO: 291918
  Synthetic oligonucleotide

SEQ ID NO: 658149 - DNA, 55 bp, Artificial; identical to SEQ ID NO: 291919
  Synthetic oligonucleotide

SEQ ID NO: 658150 - DNA, 54 bp, Artificial; identical to SEQ ID NO: 289716
  Synthetic oligonucleotide

SEQ ID NO: 658151 - DNA, 55 bp, Artificial; identical to SEQ ID NO: 291921
  Synthetic oligonucleotide

SEQ ID NO: 658152 - DNA, 55 bp, Artificial; identical to SEQ ID NO: 291922
  Synthetic oligonucleotide

SEQ ID NO: 658153 - DNA, 51 bp, Artificial; identical to SEQ ID NO: 294727
  Synthetic oligonucleotide

SEQ ID NO: 658154 - DNA, 55 bp, Artificial; identical to SEQ ID NO: 291926
  Synthetic oligonucleotide

SEQ ID NO: 658155 - DNA, 55 bp, Artificial; identical to SEQ ID NO: 291929
  Synthetic oligonucleotide

SEQ ID NO: 658156 - DNA, 60 bp, Artificial; identical to SEQ ID NO: 289416
  Synthetic oligonucleotide

SEQ ID NO: 658157 - DNA, 52 bp, Artificial; identical to SEQ ID NO: 294343
  Synthetic oligonucleotide

SEQ ID NO: 658158 - DNA, 55 bp, Artificial; identical to SEQ ID NO: 291936
  Synthetic oligonucleotide

SEQ ID NO: 658159 - DNA, 56 bp, Artificial; identical to SEQ ID NO: 286693
  Synthetic oligonucleotide

SEQ ID NO: 658160 - DNA, 55 bp, Artificial; identical to SEQ ID NO: 291937
  Synthetic oligonucleotide

SEQ ID NO: 658161 - DNA, 55 bp, Artificial; identical to SEQ ID NO: 291939
  Synthetic oligonucleotide

SEQ ID NO: 658162 - DNA, 60 bp, Artificial; identical to SEQ ID NO: 291449
  Synthetic oligonucleotide

SEQ ID NO: 658163 - DNA, 55 bp, Artificial; identical to SEQ ID NO: 291942
  Synthetic oligonucleotide

SEQ ID NO: 658164 - DNA, 54 bp, Artificial; identical to SEQ ID NO: 291943
  Synthetic oligonucleotide

SEQ ID NO: 658165 - DNA, 55 bp, Artificial; identical to SEQ ID NO: 291749
  Synthetic oligonucleotide

SEQ ID NO: 658166 - DNA, 55 bp, Artificial; identical to SEQ ID NO: 291751
  Synthetic oligonucleotide

SEQ ID NO: 658167 - DNA, 53 bp, Artificial; identical to SEQ ID NO: 295660
  Synthetic oligonucleotide

SEQ ID NO: 658168 - DNA, 55 bp, Artificial; identical to SEQ ID NO: 291754
  Synthetic oligonucleotide

SEQ ID NO: 658169 - DNA, 55 bp, Artificial; identical to SEQ ID NO: 291756
  Synthetic oligonucleotide

SEQ ID NO: 658170 - DNA, 55 bp, Artificial; identical to SEQ ID NO: 291757
  Synthetic oligonucleotide

SEQ ID NO: 658171 - DNA, 55 bp, Artificial; identical to SEQ ID NO: 291759
  Synthetic oligonucleotide

SEQ ID NO: 658172 - DNA, 55 bp, Artificial; identical to SEQ ID NO: 291760
  Synthetic oligonucleotide

SEQ ID NO: 658173 - DNA, 51 bp, Artificial; identical to SEQ ID NO: 294537
  Synthetic oligonucleotide

SEQ ID NO: 658174 - DNA, 55 bp, Artificial; identical to SEQ ID NO: 291764
  Synthetic oligonucleotide

SEQ ID NO: 658175 - DNA, 60 bp, Artificial; identical to SEQ ID NO: 291316
  Synthetic oligonucleotide

SEQ ID NO: 658176 - DNA, 55 bp, Artificial; identical to SEQ ID NO: 291766
  Synthetic oligonucleotide

SEQ ID NO: 658177 - DNA, 54 bp, Artificial; identical to SEQ ID NO: 293162
  Synthetic oligonucleotide

SEQ ID NO: 658178 - DNA, 55 bp, Artificial; identical to SEQ ID NO: 291769
  Synthetic oligonucleotide

SEQ ID NO: 658179 - DNA, 55 bp, Artificial; identical to SEQ ID NO: 291771
  Synthetic oligonucleotide

SEQ ID NO: 658180 - DNA, 55 bp, Artificial; identical to SEQ ID NO: 291773
  Synthetic oligonucleotide

SEQ ID NO: 658181 - DNA, 56 bp, Artificial; identical to SEQ ID NO: 286849
  Synthetic oligonucleotide

SEQ ID NO: 658182 - DNA, 55 bp, Artificial; identical to SEQ ID NO: 291774
  Synthetic oligonucleotide

SEQ ID NO: 658183 - DNA, 55 bp, Artificial; identical to SEQ ID NO: 291227
  Synthetic oligonucleotide

SEQ ID NO: 658184 - DNA, 55 bp, Artificial; identical to SEQ ID NO: 291776
  Synthetic oligonucleotide

SEQ ID NO: 658185 - DNA, 55 bp, Artificial; identical to SEQ ID NO: 291778
  Synthetic oligonucleotide

SEQ ID NO: 658186 - DNA, 55 bp, Artificial; identical to SEQ ID NO: 291780
  Synthetic oligonucleotide

SEQ ID NO: 658187 - DNA, 51 bp, Artificial; identical to SEQ ID NO: 294478
  Synthetic oligonucleotide

SEQ ID NO: 658188 - DNA, 55 bp, Artificial; identical to SEQ ID NO: 291717
  Synthetic oligonucleotide

SEQ ID NO: 658189 - DNA, 55 bp, Artificial; identical to SEQ ID NO: 291719
  Synthetic oligonucleotide

SEQ ID NO: 658190 - DNA, 50 bp, Artificial; identical to SEQ ID NO: 295681
  Synthetic oligonucleotide

SEQ ID NO: 658191 - DNA, 56 bp, Artificial; identical to SEQ ID NO: 291805
  Synthetic oligonucleotide

SEQ ID NO: 658192 - DNA, 53 bp, Artificial; identical to SEQ ID NO: 291721
  Synthetic oligonucleotide

SEQ ID NO: 658193 - DNA, 55 bp, Artificial; identical to SEQ ID NO: 291722
  Synthetic oligonucleotide

SEQ ID NO: 658194 - DNA, 55 bp, Artificial; identical to SEQ ID NO: 291725
  Synthetic oligonucleotide

SEQ ID NO: 658195 - DNA, 58 bp, Artificial; identical to SEQ ID NO: 291660
  Synthetic oligonucleotide

SEQ ID NO: 658196 - DNA, 51 bp, Artificial; identical to SEQ ID NO: 294462
  Synthetic oligonucleotide

SEQ ID NO: 658197 - DNA, 55 bp, Artificial; identical to SEQ ID NO: 291730
  Synthetic oligonucleotide

SEQ ID NO: 658198 - DNA, 55 bp, Artificial; identical to SEQ ID NO: 291734
  Synthetic oligonucleotide

SEQ ID NO: 658199 - DNA, 51 bp, Artificial; identical to SEQ ID NO: 291736
  Synthetic oligonucleotide

SEQ ID NO: 658200 - DNA, 55 bp, Artificial; identical to SEQ ID NO: 291740
  Synthetic oligonucleotide

SEQ ID NO: 658201 - DNA, 55 bp, Artificial; identical to SEQ ID NO: 291741
  Synthetic oligonucleotide

SEQ ID NO: 658202 - DNA, 58 bp, Artificial; identical to SEQ ID NO: 295205
  Synthetic oligonucleotide

SEQ ID NO: 658203 - DNA, 55 bp, Artificial; identical to SEQ ID NO: 291745
  Synthetic oligonucleotide

SEQ ID NO: 658204 - DNA, 55 bp, Artificial; identical to SEQ ID NO: 291746
  Synthetic oligonucleotide

SEQ ID NO: 658205 - DNA, 55 bp, Artificial; identical to SEQ ID NO: 291747
  Synthetic oligonucleotide

SEQ ID NO: 658206 - DNA, 54 bp, Artificial; identical to SEQ ID NO: 293290
  Synthetic oligonucleotide

SEQ ID NO: 658207 - DNA, 55 bp, Artificial; identical to SEQ ID NO: 291817
  Synthetic oligonucleotide

SEQ ID NO: 658208 - DNA, 51 bp, Artificial; identical to SEQ ID NO: 291820
  Synthetic oligonucleotide

SEQ ID NO: 658209 - DNA, 55 bp, Artificial; identical to SEQ ID NO: 291821
  Synthetic oligonucleotide

SEQ ID NO: 658210 - DNA, 55 bp, Artificial; identical to SEQ ID NO: 291823
  Synthetic oligonucleotide

SEQ ID NO: 658211 - DNA, 53 bp, Artificial; identical to SEQ ID NO: 291824
  Synthetic oligonucleotide

SEQ ID NO: 658212 - DNA, 52 bp, Artificial; identical to SEQ ID NO: 294318
  Synthetic oligonucleotide

SEQ ID NO: 658213 - DNA, 53 bp, Artificial; identical to SEQ ID NO: 293858
  Synthetic oligonucleotide

SEQ ID NO: 658214 - DNA, 55 bp, Artificial; identical to SEQ ID NO: 291829
  Synthetic oligonucleotide

SEQ ID NO: 658215 - DNA, 55 bp, Artificial; identical to SEQ ID NO: 291832
  Synthetic oligonucleotide

SEQ ID NO: 658216 - DNA, 57 bp, Artificial; identical to SEQ ID NO: 290615
  Synthetic oligonucleotide

SEQ ID NO: 658217 - DNA, 60 bp, Artificial; identical to SEQ ID NO: 290604
  Synthetic oligonucleotide

SEQ ID NO: 658218 - DNA, 58 bp, Artificial; identical to SEQ ID NO: 290571
  Synthetic oligonucleotide

SEQ ID NO: 658219 - DNA, 55 bp, Artificial; identical to SEQ ID NO: 291837
  Synthetic oligonucleotide

SEQ ID NO: 658220 - DNA, 57 bp, Artificial; identical to SEQ ID NO: 294249
  Synthetic oligonucleotide

SEQ ID NO: 658221 - DNA, 51 bp, Artificial; identical to SEQ ID NO: 294776
  Synthetic oligonucleotide

SEQ ID NO: 658222 - DNA, 55 bp, Artificial; identical to SEQ ID NO: 291840
  Synthetic oligonucleotide

SEQ ID NO: 658223 - DNA, 59 bp, Artificial; identical to SEQ ID NO: 294804
  Synthetic oligonucleotide

SEQ ID NO: 658224 - DNA, 54 bp, Artificial; identical to SEQ ID NO: 293309
  Synthetic oligonucleotide

SEQ ID NO: 658225 - DNA, 55 bp, Artificial; identical to SEQ ID NO: 291843
  Synthetic oligonucleotide

SEQ ID NO: 658226 - DNA, 55 bp, Artificial; identical to SEQ ID NO: 291844
  Synthetic oligonucleotide

SEQ ID NO: 658227 - DNA, 57 bp, Artificial; identical to SEQ ID NO: 290994
  Synthetic oligonucleotide

SEQ ID NO: 658228 - DNA, 55 bp, Artificial; identical to SEQ ID NO: 291784
  Synthetic oligonucleotide

SEQ ID NO: 658229 - DNA, 58 bp, Artificial; identical to SEQ ID NO: 291083
  Synthetic oligonucleotide

SEQ ID NO: 658230 - DNA, 58 bp, Artificial; identical to SEQ ID NO: 291094
  Synthetic oligonucleotide

SEQ ID NO: 658231 - DNA, 55 bp, Artificial; identical to SEQ ID NO: 291787
  Synthetic oligonucleotide

SEQ ID NO: 658232 - DNA, 55 bp, Artificial; identical to SEQ ID NO: 291788
  Synthetic oligonucleotide

SEQ ID NO: 658233 - DNA, 55 bp, Artificial; identical to SEQ ID NO: 291790
  Synthetic oligonucleotide

SEQ ID NO: 658234 - DNA, 55 bp, Artificial; identical to SEQ ID NO: 291791
  Synthetic oligonucleotide

SEQ ID NO: 658235 - DNA, 55 bp, Artificial; identical to SEQ ID NO: 291792
  Synthetic oligonucleotide

SEQ ID NO: 658236 - DNA, 55 bp, Artificial; identical to SEQ ID NO: 291797
  Synthetic oligonucleotide

SEQ ID NO: 658237 - DNA, 56 bp, Artificial; identical to SEQ ID NO: 297182
  Synthetic oligonucleotide

SEQ ID NO: 658238 - DNA, 55 bp, Artificial; identical to SEQ ID NO: 291798
  Synthetic oligonucleotide

SEQ ID NO: 658239 - DNA, 55 bp, Artificial; identical to SEQ ID NO: 291799
  Synthetic oligonucleotide

SEQ ID NO: 658240 - DNA, 51 bp, Artificial; identical to SEQ ID NO: 294976
  Synthetic oligonucleotide

SEQ ID NO: 658241 - DNA, 55 bp, Artificial; identical to SEQ ID NO: 291801
  Synthetic oligonucleotide

SEQ ID NO: 658242 - DNA, 53 bp, Artificial; identical to SEQ ID NO: 293831
  Synthetic oligonucleotide

SEQ ID NO: 658243 - DNA, 55 bp, Artificial; identical to SEQ ID NO: 291802
  Synthetic oligonucleotide

SEQ ID NO: 658244 - DNA, 55 bp, Artificial; identical to SEQ ID NO: 291803
  Synthetic oligonucleotide

SEQ ID NO: 658245 - DNA, 54 bp, Artificial; identical to SEQ ID NO: 291813
  Synthetic oligonucleotide

SEQ ID NO: 658246 - DNA, 60 bp, Artificial; identical to SEQ ID NO: 295182
  Synthetic oligonucleotide

SEQ ID NO: 658247 - DNA, 53 bp, Artificial; identical to SEQ ID NO: 293910
  Synthetic oligonucleotide

SEQ ID NO: 658248 - DNA, 55 bp, Artificial; identical to SEQ ID NO: 292866
  Synthetic oligonucleotide

SEQ ID NO: 658249 - DNA, 55 bp, Artificial; identical to SEQ ID NO: 292860
  Synthetic oligonucleotide

SEQ ID NO: 658250 - DNA, 55 bp, Artificial; identical to SEQ ID NO: 292889
  Synthetic oligonucleotide

SEQ ID NO: 658251 - DNA, 51 bp, Artificial; identical to SEQ ID NO: 294825
  Synthetic oligonucleotide

SEQ ID NO: 658252 - DNA, 50 bp, Artificial; identical to SEQ ID NO: 295902
  Synthetic oligonucleotide

SEQ ID NO: 658253 - DNA, 55 bp, Artificial; identical to SEQ ID NO: 292807
  Synthetic oligonucleotide

SEQ ID NO: 658254 - DNA, 55 bp, Artificial; identical to SEQ ID NO: 292799
  Synthetic oligonucleotide

SEQ ID NO: 658255 - DNA, 60 bp, Artificial; identical to SEQ ID NO: 287483
  Synthetic oligonucleotide

SEQ ID NO: 658256 - DNA, 53 bp, Artificial; identical to SEQ ID NO: 293792
  Synthetic oligonucleotide

SEQ ID NO: 658257 - DNA, 60 bp, Artificial; identical to SEQ ID NO: 287517
  Synthetic oligonucleotide

SEQ ID NO: 658258 - DNA, 54 bp, Artificial; identical to SEQ ID NO: 293312
  Synthetic oligonucleotide

SEQ ID NO: 658259 - DNA, 55 bp, Artificial; identical to SEQ ID NO: 292785
  Synthetic oligonucleotide

SEQ ID NO: 658260 - DNA, 59 bp, Artificial; identical to SEQ ID NO: 287583
  Synthetic oligonucleotide

SEQ ID NO: 658261 - DNA, 55 bp, Artificial; identical to SEQ ID NO: 292840
  Synthetic oligonucleotide

SEQ ID NO: 658262 - DNA, 55 bp, Artificial; identical to SEQ ID NO: 287417
  Synthetic oligonucleotide

SEQ ID NO: 658263 - DNA, 55 bp, Artificial; identical to SEQ ID NO: 292824
  Synthetic oligonucleotide

SEQ ID NO: 658264 - DNA, 55 bp, Artificial; identical to SEQ ID NO: 292822
  Synthetic oligonucleotide

SEQ ID NO: 658265 - DNA, 53 bp, Artificial; identical to SEQ ID NO: 293665
  Synthetic oligonucleotide

SEQ ID NO: 658266 - DNA, 54 bp, Artificial; identical to SEQ ID NO: 292816
  Synthetic oligonucleotide

SEQ ID NO: 658267 - DNA, 59 bp, Artificial; identical to SEQ ID NO: 286937
  Synthetic oligonucleotide

SEQ ID NO: 658268 - DNA, 52 bp, Artificial; identical to SEQ ID NO: 294363
  Synthetic oligonucleotide

SEQ ID NO: 658269 - DNA, 55 bp, Artificial; identical to SEQ ID NO: 292966
  Synthetic oligonucleotide

SEQ ID NO: 658270 - DNA, 50 bp, Artificial; identical to SEQ ID NO: 295728
  Synthetic oligonucleotide

SEQ ID NO: 658271 - DNA, 52 bp, Artificial; identical to SEQ ID NO: 294373
  Synthetic oligonucleotide

SEQ ID NO: 658272 - DNA, 52 bp, Artificial; identical to SEQ ID NO: 294390
  Synthetic oligonucleotide

SEQ ID NO: 658273 - DNA, 56 bp, Artificial; identical to SEQ ID NO: 286971
  Synthetic oligonucleotide

SEQ ID NO: 658274 - DNA, 55 bp, Artificial; identical to SEQ ID NO: 292945
  Synthetic oligonucleotide

SEQ ID NO: 658275 - DNA, 55 bp, Artificial; identical to SEQ ID NO: 292947
  Synthetic oligonucleotide

SEQ ID NO: 658276 - DNA, 55 bp, Artificial; identical to SEQ ID NO: 292951
  Synthetic oligonucleotide

SEQ ID NO: 658277 - DNA, 55 bp, Artificial; identical to SEQ ID NO: 292909
  Synthetic oligonucleotide

SEQ ID NO: 658278 - DNA, 55 bp, Artificial; identical to SEQ ID NO: 292915
  Synthetic oligonucleotide

SEQ ID NO: 658279 - DNA, 55 bp, Artificial; identical to SEQ ID NO: 292928
  Synthetic oligonucleotide

SEQ ID NO: 658280 - DNA, 57 bp, Artificial; identical to SEQ ID NO: 296393
  Synthetic oligonucleotide

SEQ ID NO: 658281 - DNA, 58 bp, Artificial; identical to SEQ ID NO: 288627
  Synthetic oligonucleotide

SEQ ID NO: 658282 - DNA, 55 bp, Artificial; identical to SEQ ID NO: 292596
  Synthetic oligonucleotide

SEQ ID NO: 658283 - DNA, 55 bp, Artificial; identical to SEQ ID NO: 292590
  Synthetic oligonucleotide

SEQ ID NO: 658284 - DNA, 52 bp, Artificial; identical to SEQ ID NO: 292589
  Synthetic oligonucleotide

SEQ ID NO: 658285 - DNA, 51 bp, Artificial; identical to SEQ ID NO: 294420
  Synthetic oligonucleotide

SEQ ID NO: 658286 - DNA, 55 bp, Artificial; identical to SEQ ID NO: 292580
  Synthetic oligonucleotide

SEQ ID NO: 658287 - DNA, 55 bp, Artificial; identical to SEQ ID NO: 292579
  Synthetic oligonucleotide

SEQ ID NO: 658288 - DNA, 55 bp, Artificial; identical to SEQ ID NO: 292570
  Synthetic oligonucleotide

SEQ ID NO: 658289 - DNA, 55 bp, Artificial; identical to SEQ ID NO: 292568
  Synthetic oligonucleotide

SEQ ID NO: 658290 - DNA, 53 bp, Artificial; identical to SEQ ID NO: 293729
  Synthetic oligonucleotide

SEQ ID NO: 658291 - DNA, 55 bp, Artificial; identical to SEQ ID NO: 292619
  Synthetic oligonucleotide

SEQ ID NO: 658292 - DNA, 57 bp, Artificial; identical to SEQ ID NO: 293071
  Synthetic oligonucleotide

SEQ ID NO: 658293 - DNA, 55 bp, Artificial; identical to SEQ ID NO: 292612
  Synthetic oligonucleotide

SEQ ID NO: 658294 - DNA, 55 bp, Artificial; identical to SEQ ID NO: 292609
  Synthetic oligonucleotide

SEQ ID NO: 658295 - DNA, 55 bp, Artificial; identical to SEQ ID NO: 292605
  Synthetic oligonucleotide

SEQ ID NO: 658296 - DNA, 55 bp, Artificial; identical to SEQ ID NO: 292531
  Synthetic oligonucleotide

SEQ ID NO: 658297 - DNA, 54 bp, Artificial; identical to SEQ ID NO: 293209
  Synthetic oligonucleotide

SEQ ID NO: 658298 - DNA, 51 bp, Artificial; identical to SEQ ID NO: 294716
  Synthetic oligonucleotide

SEQ ID NO: 658299 - DNA, 52 bp, Artificial; identical to SEQ ID NO: 294228
  Synthetic oligonucleotide

SEQ ID NO: 658300 - DNA, 55 bp, Artificial; identical to SEQ ID NO: 292567
  Synthetic oligonucleotide

SEQ ID NO: 658301 - DNA, 55 bp, Artificial; identical to SEQ ID NO: 292540
  Synthetic oligonucleotide

SEQ ID NO: 658302 - DNA, 55 bp, Artificial; identical to SEQ ID NO: 292537
  Synthetic oligonucleotide

SEQ ID NO: 658303 - DNA, 55 bp, Artificial; identical to SEQ ID NO: 292741
  Synthetic oligonucleotide

SEQ ID NO: 658304 - DNA, 60 bp, Artificial; identical to SEQ ID NO: 288605
  Synthetic oligonucleotide

SEQ ID NO: 658305 - DNA, 55 bp, Artificial; identical to SEQ ID NO: 292720
  Synthetic oligonucleotide

SEQ ID NO: 658306 - DNA, 55 bp, Artificial; identical to SEQ ID NO: 292719
  Synthetic oligonucleotide

SEQ ID NO: 658307 - DNA, 55 bp, Artificial; identical to SEQ ID NO: 292775
  Synthetic oligonucleotide

SEQ ID NO: 658308 - DNA, 55 bp, Artificial; identical to SEQ ID NO: 292768
  Synthetic oligonucleotide

SEQ ID NO: 658309 - DNA, 56 bp, Artificial; identical to SEQ ID NO: 286716
  Synthetic oligonucleotide

SEQ ID NO: 658310 - DNA, 55 bp, Artificial; identical to SEQ ID NO: 292765
  Synthetic oligonucleotide

SEQ ID NO: 658311 - DNA, 55 bp, Artificial; identical to SEQ ID NO: 292752
  Synthetic oligonucleotide

SEQ ID NO: 658312 - DNA, 55 bp, Artificial; identical to SEQ ID NO: 292664
  Synthetic oligonucleotide

SEQ ID NO: 658313 - DNA, 55 bp, Artificial; identical to SEQ ID NO: 292663
  Synthetic oligonucleotide

SEQ ID NO: 658314 - DNA, 55 bp, Artificial; identical to SEQ ID NO: 292662
  Synthetic oligonucleotide

SEQ ID NO: 658315 - DNA, 55 bp, Artificial; identical to SEQ ID NO: 292655
  Synthetic oligonucleotide

SEQ ID NO: 658316 - DNA, 55 bp, Artificial; identical to SEQ ID NO: 292652
  Synthetic oligonucleotide

SEQ ID NO: 658317 - DNA, 58 bp, Artificial; identical to SEQ ID NO: 288938
  Synthetic oligonucleotide

SEQ ID NO: 658318 - DNA, 55 bp, Artificial; identical to SEQ ID NO: 292683
  Synthetic oligonucleotide

SEQ ID NO: 658319 - DNA, 55 bp, Artificial; identical to SEQ ID NO: 292679
  Synthetic oligonucleotide

SEQ ID NO: 658320 - DNA, 55 bp, Artificial; identical to SEQ ID NO: 292675
  Synthetic oligonucleotide

SEQ ID NO: 658321 - DNA, 55 bp, Artificial; identical to SEQ ID NO: 292699
  Synthetic oligonucleotide

SEQ ID NO: 658322 - DNA, 55 bp, Artificial; identical to SEQ ID NO: 292705
  Synthetic oligonucleotide

SEQ ID NO: 658323 - DNA, 55 bp, Artificial; identical to SEQ ID NO: 292706
  Synthetic oligonucleotide

SEQ ID NO: 658324 - DNA, 55 bp, Artificial; identical to SEQ ID NO: 292644
  Synthetic oligonucleotide

SEQ ID NO: 658325 - DNA, 52 bp, Artificial; identical to SEQ ID NO: 294263
  Synthetic oligonucleotide

SEQ ID NO: 658326 - DNA, 52 bp, Artificial; identical to SEQ ID NO: 294331
  Synthetic oligonucleotide

SEQ ID NO: 658327 - DNA, 55 bp, Artificial; identical to SEQ ID NO: 292746
  Synthetic oligonucleotide

SEQ ID NO: 658328 - DNA, 51 bp, Artificial; identical to SEQ ID NO: 294813
  Synthetic oligonucleotide

SEQ ID NO: 658329 - DNA, 55 bp, Artificial; identical to SEQ ID NO: 292753
  Synthetic oligonucleotide

SEQ ID NO: 658330 - DNA, 55 bp, Artificial; identical to SEQ ID NO: 292709
  Synthetic oligonucleotide

SEQ ID NO: 658331 - DNA, 55 bp, Artificial; identical to SEQ ID NO: 292727
  Synthetic oligonucleotide

SEQ ID NO: 658332 - DNA, 52 bp, Artificial; identical to SEQ ID NO: 294275
  Synthetic oligonucleotide

SEQ ID NO: 658333 - DNA, 55 bp, Artificial; identical to SEQ ID NO: 292735
  Synthetic oligonucleotide

SEQ ID NO: 658334 - DNA, 53 bp, Artificial; identical to SEQ ID NO: 293875
  Synthetic oligonucleotide

SEQ ID NO: 658335 - DNA, 55 bp, Artificial; identical to SEQ ID NO: 292544
  Synthetic oligonucleotide

SEQ ID NO: 658336 - DNA, 55 bp, Artificial; identical to SEQ ID NO: 292547
  Synthetic oligonucleotide

SEQ ID NO: 658337 - DNA, 60 bp, Artificial; identical to SEQ ID NO: 287894
  Synthetic oligonucleotide

SEQ ID NO: 658338 - DNA, 55 bp, Artificial; identical to SEQ ID NO: 292551
  Synthetic oligonucleotide

SEQ ID NO: 658339 - DNA, 52 bp, Artificial; identical to SEQ ID NO: 294265
  Synthetic oligonucleotide

SEQ ID NO: 658340 - DNA, 53 bp, Artificial; identical to SEQ ID NO: 292510
  Synthetic oligonucleotide

SEQ ID NO: 658341 - DNA, 55 bp, Artificial; identical to SEQ ID NO: 292513
  Synthetic oligonucleotide

SEQ ID NO: 658342 - DNA, 51 bp, Artificial; identical to SEQ ID NO: 294798
  Synthetic oligonucleotide

SEQ ID NO: 658343 - DNA, 55 bp, Artificial; identical to SEQ ID NO: 292608
  Synthetic oligonucleotide

SEQ ID NO: 658344 - DNA, 55 bp, Artificial; identical to SEQ ID NO: 292625
  Synthetic oligonucleotide

SEQ ID NO: 658345 - DNA, 55 bp, Artificial; identical to SEQ ID NO: 292628
  Synthetic oligonucleotide

SEQ ID NO: 658346 - DNA, 55 bp, Artificial; identical to SEQ ID NO: 292573
  Synthetic oligonucleotide

SEQ ID NO: 658347 - DNA, 55 bp, Artificial; identical to SEQ ID NO: 292584
  Synthetic oligonucleotide

SEQ ID NO: 658348 - DNA, 56 bp, Artificial; identical to SEQ ID NO: 297148
  Synthetic oligonucleotide

SEQ ID NO: 658349 - DNA, 55 bp, Artificial; identical to SEQ ID NO: 292913
  Synthetic oligonucleotide

SEQ ID NO: 658350 - DNA, 55 bp, Artificial; identical to SEQ ID NO: 292930
  Synthetic oligonucleotide

SEQ ID NO: 658351 - DNA, 55 bp, Artificial; identical to SEQ ID NO: 292937
  Synthetic oligonucleotide

SEQ ID NO: 658352 - DNA, 55 bp, Artificial; identical to SEQ ID NO: 292969
  Synthetic oligonucleotide

SEQ ID NO: 658353 - DNA, 55 bp, Artificial; identical to SEQ ID NO: 292810
  Synthetic oligonucleotide

SEQ ID NO: 658354 - DNA, 55 bp, Artificial; identical to SEQ ID NO: 292813
  Synthetic oligonucleotide

SEQ ID NO: 658355 - DNA, 52 bp, Artificial; identical to SEQ ID NO: 294253
  Synthetic oligonucleotide

SEQ ID NO: 658356 - DNA, 55 bp, Artificial; identical to SEQ ID NO: 292794
  Synthetic oligonucleotide

SEQ ID NO: 658357 - DNA, 55 bp, Artificial; identical to SEQ ID NO: 292803
  Synthetic oligonucleotide

SEQ ID NO: 658358 - DNA, 54 bp, Artificial; identical to SEQ ID NO: 292809
  Synthetic oligonucleotide

SEQ ID NO: 658359 - DNA, 52 bp, Artificial; identical to SEQ ID NO: 287616
  Synthetic oligonucleotide

SEQ ID NO: 658360 - DNA, 54 bp, Artificial; identical to SEQ ID NO: 292895
  Synthetic oligonucleotide

SEQ ID NO: 658361 - DNA, 55 bp, Artificial; identical to SEQ ID NO: 292897
  Synthetic oligonucleotide

SEQ ID NO: 658362 - DNA, 53 bp, Artificial; identical to SEQ ID NO: 292907
  Synthetic oligonucleotide

SEQ ID NO: 658363 - DNA, 56 bp, Artificial; identical to SEQ ID NO: 288149
  Synthetic oligonucleotide

SEQ ID NO: 658364 - DNA, 55 bp, Artificial; identical to SEQ ID NO: 292901
  Synthetic oligonucleotide

SEQ ID NO: 658365 - DNA, 55 bp, Artificial; identical to SEQ ID NO: 292884
  Synthetic oligonucleotide

SEQ ID NO: 658366 - DNA, 53 bp, Artificial; identical to SEQ ID NO: 292599
  Synthetic oligonucleotide

SEQ ID NO: 658367 - DNA, 55 bp, Artificial; identical to SEQ ID NO: 292637
  Synthetic oligonucleotide

SEQ ID NO: 658368 - DNA, 54 bp, Artificial; identical to SEQ ID NO: 292772
  Synthetic oligonucleotide

SEQ ID NO: 658369 - DNA, 51 bp, Artificial; identical to SEQ ID NO: 294662
  Synthetic oligonucleotide

SEQ ID NO: 658370 - DNA, 60 bp, Artificial; identical to SEQ ID NO: 288049
  Synthetic oligonucleotide

SEQ ID NO: 658371 - DNA, 55 bp, Artificial; identical to SEQ ID NO: 292703
  Synthetic oligonucleotide

SEQ ID NO: 658372 - DNA, 55 bp, Artificial; identical to SEQ ID NO: 292686
  Synthetic oligonucleotide

SEQ ID NO: 658373 - DNA, 55 bp, Artificial; identical to SEQ ID NO: 292673
  Synthetic oligonucleotide

SEQ ID NO: 658374 - DNA, 54 bp, Artificial; identical to SEQ ID NO: 293352
  Synthetic oligonucleotide

SEQ ID NO: 658375 - DNA, 51 bp, Artificial; identical to SEQ ID NO: 294444
  Synthetic oligonucleotide

SEQ ID NO: 658376 - DNA, 53 bp, Artificial; identical to SEQ ID NO: 293374
  Synthetic oligonucleotide

SEQ ID NO: 658377 - DNA, 55 bp, Artificial; identical to SEQ ID NO: 292757
  Synthetic oligonucleotide

SEQ ID NO: 658378 - DNA, 55 bp, Artificial; identical to SEQ ID NO: 292764
  Synthetic oligonucleotide

SEQ ID NO: 658379 - DNA, 53 bp, Artificial; identical to SEQ ID NO: 293601
  Synthetic oligonucleotide

SEQ ID NO: 658380 - DNA, 55 bp, Artificial; identical to SEQ ID NO: 292710
  Synthetic oligonucleotide

SEQ ID NO: 658381 - DNA, 55 bp, Artificial; identical to SEQ ID NO: 292711
  Synthetic oligonucleotide

SEQ ID NO: 658382 - DNA, 52 bp, Artificial; identical to SEQ ID NO: 294280
  Synthetic oligonucleotide

SEQ ID NO: 658383 - DNA, 53 bp, Artificial; identical to SEQ ID NO: 292558
  Synthetic oligonucleotide

SEQ ID NO: 658384 - DNA, 55 bp, Artificial; identical to SEQ ID NO: 292564
  Synthetic oligonucleotide

SEQ ID NO: 658385 - DNA, 54 bp, Artificial; identical to SEQ ID NO: 292501
  Synthetic oligonucleotide

SEQ ID NO: 658386 - DNA, 53 bp, Artificial; identical to SEQ ID NO: 292508
  Synthetic oligonucleotide

SEQ ID NO: 658387 - DNA, 55 bp, Artificial; identical to SEQ ID NO: 292517
  Synthetic oligonucleotide

SEQ ID NO: 658388 - DNA, 55 bp, Artificial; identical to SEQ ID NO: 292621
  Synthetic oligonucleotide

SEQ ID NO: 658389 - DNA, 54 bp, Artificial; identical to SEQ ID NO: 292581
  Synthetic oligonucleotide

SEQ ID NO: 658390 - DNA, 55 bp, Artificial; identical to SEQ ID NO: 292602
  Synthetic oligonucleotide

SEQ ID NO: 658391 - DNA, 55 bp, Artificial; identical to SEQ ID NO: 292954
  Synthetic oligonucleotide

SEQ ID NO: 658392 - DNA, 54 bp, Artificial; identical to SEQ ID NO: 293184
  Synthetic oligonucleotide

SEQ ID NO: 658393 - DNA, 51 bp, Artificial; identical to SEQ ID NO: 294846
  Synthetic oligonucleotide

SEQ ID NO: 658394 - DNA, 51 bp, Artificial; identical to SEQ ID NO: 294910
  Synthetic oligonucleotide

SEQ ID NO: 658395 - DNA, 55 bp, Artificial; identical to SEQ ID NO: 292814
  Synthetic oligonucleotide

SEQ ID NO: 658396 - DNA, 55 bp, Artificial; identical to SEQ ID NO: 292818
  Synthetic oligonucleotide

SEQ ID NO: 658397 - DNA, 55 bp, Artificial; identical to SEQ ID NO: 292841
  Synthetic oligonucleotide

SEQ ID NO: 658398 - DNA, 55 bp, Artificial; identical to SEQ ID NO: 292787
  Synthetic oligonucleotide

SEQ ID NO: 658399 - DNA, 55 bp, Artificial; identical to SEQ ID NO: 292878
  Synthetic oligonucleotide

SEQ ID NO: 658400 - DNA, 55 bp, Artificial; identical to SEQ ID NO: 292851
  Synthetic oligonucleotide

SEQ ID NO: 658401 - DNA, 55 bp, Artificial; identical to SEQ ID NO: 292865
  Synthetic oligonucleotide

SEQ ID NO: 658402 - DNA, 53 bp, Artificial; identical to SEQ ID NO: 293472
  Synthetic oligonucleotide

SEQ ID NO: 658403 - DNA, 55 bp, Artificial; identical to SEQ ID NO: 292870
  Synthetic oligonucleotide

SEQ ID NO: 658404 - DNA, 52 bp, Artificial; identical to SEQ ID NO: 292858
  Synthetic oligonucleotide

SEQ ID NO: 658405 - DNA, 55 bp, Artificial; identical to SEQ ID NO: 292789
  Synthetic oligonucleotide

SEQ ID NO: 658406 - DNA, 54 bp, Artificial; identical to SEQ ID NO: 293296
  Synthetic oligonucleotide

SEQ ID NO: 658407 - DNA, 55 bp, Artificial; identical to SEQ ID NO: 292962
  Synthetic oligonucleotide

SEQ ID NO: 658408 - DNA, 55 bp, Artificial; identical to SEQ ID NO: 292955
  Synthetic oligonucleotide

SEQ ID NO: 658409 - DNA, 49 bp, Artificial; identical to SEQ ID NO: 294822
  Synthetic oligonucleotide

SEQ ID NO: 658410 - DNA, 53 bp, Artificial; identical to SEQ ID NO: 292929
  Synthetic oligonucleotide

SEQ ID NO: 658411 - DNA, 55 bp, Artificial; identical to SEQ ID NO: 292936
  Synthetic oligonucleotide

SEQ ID NO: 658412 - DNA, 53 bp, Artificial; identical to SEQ ID NO: 293583
  Synthetic oligonucleotide

SEQ ID NO: 658413 - DNA, 55 bp, Artificial; identical to SEQ ID NO: 292952
  Synthetic oligonucleotide

SEQ ID NO: 658414 - DNA, 55 bp, Artificial; identical to SEQ ID NO: 292911
  Synthetic oligonucleotide

SEQ ID NO: 658415 - DNA, 55 bp, Artificial; identical to SEQ ID NO: 292597
  Synthetic oligonucleotide

SEQ ID NO: 658416 - DNA, 50 bp, Artificial; identical to SEQ ID NO: 292636
  Synthetic oligonucleotide

SEQ ID NO: 658417 - DNA, 55 bp, Artificial; identical to SEQ ID NO: 292635
  Synthetic oligonucleotide

SEQ ID NO: 658418 - DNA, 55 bp, Artificial; identical to SEQ ID NO: 292622
  Synthetic oligonucleotide

SEQ ID NO: 658419 - DNA, 53 bp, Artificial; identical to SEQ ID NO: 296416
  Synthetic oligonucleotide

SEQ ID NO: 658420 - DNA, 55 bp, Artificial; identical to SEQ ID NO: 292502
  Synthetic oligonucleotide

SEQ ID NO: 658421 - DNA, 54 bp, Artificial; identical to SEQ ID NO: 292534
  Synthetic oligonucleotide

SEQ ID NO: 658422 - DNA, 51 bp, Artificial; identical to SEQ ID NO: 292730
  Synthetic oligonucleotide

SEQ ID NO: 658423 - DNA, 47 bp, Artificial; identical to SEQ ID NO: 292722
  Synthetic oligonucleotide

SEQ ID NO: 658424 - DNA, 54 bp, Artificial; identical to SEQ ID NO: 292716
  Synthetic oligonucleotide

SEQ ID NO: 658425 - DNA, 53 bp, Artificial; identical to SEQ ID NO: 293596
  Synthetic oligonucleotide

SEQ ID NO: 658426 - DNA, 55 bp, Artificial; identical to SEQ ID NO: 292769
  Synthetic oligonucleotide

SEQ ID NO: 658427 - DNA, 55 bp, Artificial; identical to SEQ ID NO: 292763
  Synthetic oligonucleotide

SEQ ID NO: 658428 - DNA, 55 bp, Artificial; identical to SEQ ID NO: 292756
  Synthetic oligonucleotide

SEQ ID NO: 658429 - DNA, 55 bp, Artificial; identical to SEQ ID NO: 292672
  Synthetic oligonucleotide

SEQ ID NO: 658430 - DNA, 53 bp, Artificial; identical to SEQ ID NO: 293444
  Synthetic oligonucleotide

SEQ ID NO: 658431 - DNA, 55 bp, Artificial; identical to SEQ ID NO: 292640
  Synthetic oligonucleotide

SEQ ID NO: 658432 - DNA, 55 bp, Artificial; identical to SEQ ID NO: 292707
  Synthetic oligonucleotide

SEQ ID NO: 658433 - DNA, 50 bp, Artificial; identical to SEQ ID NO: 296739
  Synthetic oligonucleotide

SEQ ID NO: 658434 - DNA, 51 bp, Artificial; identical to SEQ ID NO: 294683
  Synthetic oligonucleotide

SEQ ID NO: 658435 - DNA, 55 bp, Artificial; identical to SEQ ID NO: 292687
  Synthetic oligonucleotide

SEQ ID NO: 658436 - DNA, 59 bp, Artificial; identical to SEQ ID NO: 292027
  Synthetic oligonucleotide

SEQ ID NO: 658437 - DNA, 53 bp, Artificial; identical to SEQ ID NO: 292658
  Synthetic oligonucleotide

SEQ ID NO: 658438 - DNA, 55 bp, Artificial; identical to SEQ ID NO: 292747
  Synthetic oligonucleotide

SEQ ID NO: 658439 - DNA, 55 bp, Artificial; identical to SEQ ID NO: 292725
  Synthetic oligonucleotide

SEQ ID NO: 658440 - DNA, 55 bp, Artificial; identical to SEQ ID NO: 292729
  Synthetic oligonucleotide

SEQ ID NO: 658441 - DNA, 55 bp, Artificial; identical to SEQ ID NO: 292541
  Synthetic oligonucleotide

SEQ ID NO: 658442 - DNA, 55 bp, Artificial; identical to SEQ ID NO: 292546
  Synthetic oligonucleotide

SEQ ID NO: 658443 - DNA, 55 bp, Artificial; identical to SEQ ID NO: 292563
  Synthetic oligonucleotide

SEQ ID NO: 658444 - DNA, 55 bp, Artificial; identical to SEQ ID NO: 292503
  Synthetic oligonucleotide

SEQ ID NO: 658445 - DNA, 51 bp, Artificial; identical to SEQ ID NO: 292509
  Synthetic oligonucleotide

SEQ ID NO: 658446 - DNA, 53 bp, Artificial; identical to SEQ ID NO: 291938
  Synthetic oligonucleotide

SEQ ID NO: 658447 - DNA, 55 bp, Artificial; identical to SEQ ID NO: 292525
  Synthetic oligonucleotide

SEQ ID NO: 658448 - DNA, 55 bp, Artificial; identical to SEQ ID NO: 292526
  Synthetic oligonucleotide

SEQ ID NO: 658449 - DNA, 55 bp, Artificial; identical to SEQ ID NO: 292532
  Synthetic oligonucleotide

SEQ ID NO: 658450 - DNA, 54 bp, Artificial; identical to SEQ ID NO: 293130
  Synthetic oligonucleotide

SEQ ID NO: 658451 - DNA, 57 bp, Artificial; identical to SEQ ID NO: 296227
  Synthetic oligonucleotide

SEQ ID NO: 658452 - DNA, 55 bp, Artificial; identical to SEQ ID NO: 292591
  Synthetic oligonucleotide

SEQ ID NO: 658453 - DNA, 55 bp, Artificial; identical to SEQ ID NO: 292910
  Synthetic oligonucleotide

SEQ ID NO: 658454 - DNA, 55 bp, Artificial; identical to SEQ ID NO: 292811
  Synthetic oligonucleotide

SEQ ID NO: 658455 - DNA, 55 bp, Artificial; identical to SEQ ID NO: 292812
  Synthetic oligonucleotide

SEQ ID NO: 658456 - DNA, 55 bp, Artificial; identical to SEQ ID NO: 292831
  Synthetic oligonucleotide

SEQ ID NO: 658457 - DNA, 55 bp, Artificial; identical to SEQ ID NO: 292834
  Synthetic oligonucleotide

SEQ ID NO: 658458 - DNA, 60 bp, Artificial; identical to SEQ ID NO: 292393
  Synthetic oligonucleotide

SEQ ID NO: 658459 - DNA, 55 bp, Artificial; identical to SEQ ID NO: 292781
  Synthetic oligonucleotide

SEQ ID NO: 658460 - DNA, 53 bp, Artificial; identical to SEQ ID NO: 293451
  Synthetic oligonucleotide

SEQ ID NO: 658461 - DNA, 55 bp, Artificial; identical to SEQ ID NO: 292805
  Synthetic oligonucleotide

SEQ ID NO: 658462 - DNA, 54 bp, Artificial; identical to SEQ ID NO: 292900
  Synthetic oligonucleotide

SEQ ID NO: 658463 - DNA, 55 bp, Artificial; identical to SEQ ID NO: 292906
  Synthetic oligonucleotide

SEQ ID NO: 658464 - DNA, 53 bp, Artificial; identical to SEQ ID NO: 293466
  Synthetic oligonucleotide

SEQ ID NO: 658465 - DNA, 55 bp, Artificial; identical to SEQ ID NO: 292869
  Synthetic oligonucleotide

SEQ ID NO: 658466 - DNA, 60 bp, Artificial; identical to SEQ ID NO: 292227
  Synthetic oligonucleotide

SEQ ID NO: 658467 - DNA, 55 bp, Artificial; identical to SEQ ID NO: 292855
  Synthetic oligonucleotide

SEQ ID NO: 658468 - DNA, 54 bp, Artificial; identical to SEQ ID NO: 293018
  Synthetic oligonucleotide

SEQ ID NO: 658469 - DNA, 55 bp, Artificial; identical to SEQ ID NO: 292847
  Synthetic oligonucleotide

SEQ ID NO: 658470 - DNA, 55 bp, Artificial; identical to SEQ ID NO: 292844
  Synthetic oligonucleotide

SEQ ID NO: 658471 - DNA, 55 bp, Artificial; identical to SEQ ID NO: 292898
  Synthetic oligonucleotide

SEQ ID NO: 658472 - DNA, 55 bp, Artificial; identical to SEQ ID NO: 292891
  Synthetic oligonucleotide

SEQ ID NO: 658473 - DNA, 55 bp, Artificial; identical to SEQ ID NO: 292801
  Synthetic oligonucleotide

SEQ ID NO: 658474 - DNA, 55 bp, Artificial; identical to SEQ ID NO: 292798
  Synthetic oligonucleotide

SEQ ID NO: 658475 - DNA, 55 bp, Artificial; identical to SEQ ID NO: 292791
  Synthetic oligonucleotide

SEQ ID NO: 658476 - DNA, 54 bp, Artificial; identical to SEQ ID NO: 292836
  Synthetic oligonucleotide

SEQ ID NO: 658477 - DNA, 55 bp, Artificial; identical to SEQ ID NO: 292828
  Synthetic oligonucleotide

SEQ ID NO: 658478 - DNA, 55 bp, Artificial; identical to SEQ ID NO: 292819
  Synthetic oligonucleotide

SEQ ID NO: 658479 - DNA, 53 bp, Artificial; identical to SEQ ID NO: 293818
  Synthetic oligonucleotide

SEQ ID NO: 658480 - DNA, 51 bp, Artificial; identical to SEQ ID NO: 294440
  Synthetic oligonucleotide

SEQ ID NO: 658481 - DNA, 54 bp, Artificial; identical to SEQ ID NO: 292941
  Synthetic oligonucleotide

SEQ ID NO: 658482 - DNA, 55 bp, Artificial; identical to SEQ ID NO: 292953
  Synthetic oligonucleotide

SEQ ID NO: 658483 - DNA, 55 bp, Artificial; identical to SEQ ID NO: 292592
  Synthetic oligonucleotide

SEQ ID NO: 658484 - DNA, 54 bp, Artificial; identical to SEQ ID NO: 292588
  Synthetic oligonucleotide

SEQ ID NO: 658485 - DNA, 53 bp, Artificial; identical to SEQ ID NO: 292574
  Synthetic oligonucleotide

SEQ ID NO: 658486 - DNA, 55 bp, Artificial; identical to SEQ ID NO: 292557
  Synthetic oligonucleotide

SEQ ID NO: 658487 - DNA, 55 bp, Artificial; identical to SEQ ID NO: 292556
  Synthetic oligonucleotide

SEQ ID NO: 658488 - DNA, 55 bp, Artificial; identical to SEQ ID NO: 292545
  Synthetic oligonucleotide

SEQ ID NO: 658489 - DNA, 55 bp, Artificial; identical to SEQ ID NO: 292740
  Synthetic oligonucleotide

SEQ ID NO: 658490 - DNA, 55 bp, Artificial; identical to SEQ ID NO: 292734
  Synthetic oligonucleotide

SEQ ID NO: 658491 - DNA, 55 bp, Artificial; identical to SEQ ID NO: 292776
  Synthetic oligonucleotide

SEQ ID NO: 658492 - DNA, 46 bp, Artificial; identical to SEQ ID NO: 292754
  Synthetic oligonucleotide

SEQ ID NO: 658493 - DNA, 52 bp, Artificial; identical to SEQ ID NO: 294199
  Synthetic oligonucleotide

SEQ ID NO: 658494 - DNA, 55 bp, Artificial; identical to SEQ ID NO: 292745
  Synthetic oligonucleotide

SEQ ID NO: 658495 - DNA, 54 bp, Artificial; identical to SEQ ID NO: 292670
  Synthetic oligonucleotide

SEQ ID NO: 658496 - DNA, 55 bp, Artificial; identical to SEQ ID NO: 292659
  Synthetic oligonucleotide

SEQ ID NO: 658497 - DNA, 55 bp, Artificial; identical to SEQ ID NO: 292650
  Synthetic oligonucleotide

SEQ ID NO: 658498 - DNA, 55 bp, Artificial; identical to SEQ ID NO: 292697
  Synthetic oligonucleotide

SEQ ID NO: 658499 - DNA, 55 bp, Artificial; identical to SEQ ID NO: 292657
  Synthetic oligonucleotide

SEQ ID NO: 658500 - DNA, 60 bp, Artificial; identical to SEQ ID NO: 293305
  Synthetic oligonucleotide

SEQ ID NO: 658501 - DNA, 45 bp, Artificial; identical to SEQ ID NO: 292552
  Synthetic oligonucleotide

SEQ ID NO: 658502 - DNA, 59 bp, Artificial; identical to SEQ ID NO: 293815
  Synthetic oligonucleotide

SEQ ID NO: 658503 - DNA, 55 bp, Artificial; identical to SEQ ID NO: 292610
  Synthetic oligonucleotide

SEQ ID NO: 658504 - DNA, 55 bp, Artificial; identical to SEQ ID NO: 292587
  Synthetic oligonucleotide

SEQ ID NO: 658505 - DNA, 53 bp, Artificial; identical to SEQ ID NO: 292965
  Synthetic oligonucleotide

SEQ ID NO: 658506 - DNA, 53 bp, Artificial; identical to SEQ ID NO: 292968
  Synthetic oligonucleotide

SEQ ID NO: 658507 - DNA, 50 bp, Artificial; identical to SEQ ID NO: 295548
  Synthetic oligonucleotide

SEQ ID NO: 658508 - DNA, 55 bp, Artificial; identical to SEQ ID NO: 292832
  Synthetic oligonucleotide

SEQ ID NO: 658509 - DNA, 55 bp, Artificial; identical to SEQ ID NO: 292800
  Synthetic oligonucleotide

SEQ ID NO: 658510 - DNA, 55 bp, Artificial; identical to SEQ ID NO: 292877
  Synthetic oligonucleotide

SEQ ID NO: 658511 - DNA, 55 bp, Artificial; identical to SEQ ID NO: 292879
  Synthetic oligonucleotide

SEQ ID NO: 658512 - DNA, 55 bp, Artificial; identical to SEQ ID NO: 292892
  Synthetic oligonucleotide

SEQ ID NO: 658513 - DNA, 55 bp, Artificial; identical to SEQ ID NO: 292843
  Synthetic oligonucleotide

SEQ ID NO: 658514 - DNA, 55 bp, Artificial; identical to SEQ ID NO: 292857
  Synthetic oligonucleotide

SEQ ID NO: 658515 - DNA, 54 bp, Artificial; identical to SEQ ID NO: 292859
  Synthetic oligonucleotide

SEQ ID NO: 658516 - DNA, 56 bp, Artificial; identical to SEQ ID NO: 293593
  Synthetic oligonucleotide

SEQ ID NO: 658517 - DNA, 55 bp, Artificial; identical to SEQ ID NO: 288427
  Synthetic oligonucleotide

SEQ ID NO: 658518 - DNA, 55 bp, Artificial; identical to SEQ ID NO: 288425
  Synthetic oligonucleotide

SEQ ID NO: 658519 - DNA, 55 bp, Artificial; identical to SEQ ID NO: 288422
  Synthetic oligonucleotide

SEQ ID NO: 658520 - DNA, 55 bp, Artificial; identical to SEQ ID NO: 288421
  Synthetic oligonucleotide

SEQ ID NO: 658521 - DNA, 55 bp, Artificial; identical to SEQ ID NO: 288420
  Synthetic oligonucleotide

SEQ ID NO: 658522 - DNA, 54 bp, Artificial; identical to SEQ ID NO: 293289
  Synthetic oligonucleotide

SEQ ID NO: 658523 - DNA, 55 bp, Artificial; identical to SEQ ID NO: 288418
  Synthetic oligonucleotide

SEQ ID NO: 658524 - DNA, 55 bp, Artificial; identical to SEQ ID NO: 288416
  Synthetic oligonucleotide

SEQ ID NO: 658525 - DNA, 54 bp, Artificial; identical to SEQ ID NO: 293181
  Synthetic oligonucleotide

SEQ ID NO: 658526 - DNA, 55 bp, Artificial; identical to SEQ ID NO: 288414
  Synthetic oligonucleotide

SEQ ID NO: 658527 - DNA, 55 bp, Artificial; identical to SEQ ID NO: 288412
  Synthetic oligonucleotide

SEQ ID NO: 658528 - DNA, 48 bp, Artificial; identical to SEQ ID NO: 288410
  Synthetic oligonucleotide

SEQ ID NO: 658529 - DNA, 52 bp, Artificial; identical to SEQ ID NO: 288409
  Synthetic oligonucleotide

SEQ ID NO: 658530 - DNA, 55 bp, Artificial; identical to SEQ ID NO: 288408
  Synthetic oligonucleotide

SEQ ID NO: 658531 - DNA, 55 bp, Artificial; identical to SEQ ID NO: 288407
  Synthetic oligonucleotide

SEQ ID NO: 658532 - DNA, 50 bp, Artificial; identical to SEQ ID NO: 296175
  Synthetic oligonucleotide

SEQ ID NO: 658533 - DNA, 55 bp, Artificial; identical to SEQ ID NO: 288402
  Synthetic oligonucleotide

SEQ ID NO: 658534 - DNA, 50 bp, Artificial; identical to SEQ ID NO: 296314
  Synthetic oligonucleotide

SEQ ID NO: 658535 - DNA, 54 bp, Artificial; identical to SEQ ID NO: 288398
  Synthetic oligonucleotide

SEQ ID NO: 658536 - DNA, 54 bp, Artificial; identical to SEQ ID NO: 288395
  Synthetic oligonucleotide

SEQ ID NO: 658537 - DNA, 52 bp, Artificial; identical to SEQ ID NO: 294172
  Synthetic oligonucleotide

SEQ ID NO: 658538 - DNA, 49 bp, Artificial; identical to SEQ ID NO: 288465
  Synthetic oligonucleotide

SEQ ID NO: 658539 - DNA, 58 bp, Artificial; identical to SEQ ID NO: 293849
  Synthetic oligonucleotide

SEQ ID NO: 658540 - DNA, 55 bp, Artificial; identical to SEQ ID NO: 288464
  Synthetic oligonucleotide

SEQ ID NO: 658541 - DNA, 60 bp, Artificial; identical to SEQ ID NO: 293249
  Synthetic oligonucleotide

SEQ ID NO: 658542 - DNA, 50 bp, Artificial; identical to SEQ ID NO: 295211
  Synthetic oligonucleotide

SEQ ID NO: 658543 - DNA, 55 bp, Artificial; identical to SEQ ID NO: 288462
  Synthetic oligonucleotide

SEQ ID NO: 658544 - DNA, 55 bp, Artificial; identical to SEQ ID NO: 288460
  Synthetic oligonucleotide

SEQ ID NO: 658545 - DNA, 55 bp, Artificial; identical to SEQ ID NO: 288457
  Synthetic oligonucleotide

SEQ ID NO: 658546 - DNA, 52 bp, Artificial; identical to SEQ ID NO: 294221
  Synthetic oligonucleotide

SEQ ID NO: 658547 - DNA, 55 bp, Artificial; identical to SEQ ID NO: 288451
  Synthetic oligonucleotide

SEQ ID NO: 658548 - DNA, 57 bp, Artificial; identical to SEQ ID NO: 296893
  Synthetic oligonucleotide

SEQ ID NO: 658549 - DNA, 55 bp, Artificial; identical to SEQ ID NO: 288449
  Synthetic oligonucleotide

SEQ ID NO: 658550 - DNA, 55 bp, Artificial; identical to SEQ ID NO: 288448
  Synthetic oligonucleotide

SEQ ID NO: 658551 - DNA, 55 bp, Artificial; identical to SEQ ID NO: 288446
  Synthetic oligonucleotide

SEQ ID NO: 658552 - DNA, 55 bp, Artificial; identical to SEQ ID NO: 288445
  Synthetic oligonucleotide

SEQ ID NO: 658553 - DNA, 55 bp, Artificial; identical to SEQ ID NO: 288442
  Synthetic oligonucleotide

SEQ ID NO: 658554 - DNA, 55 bp, Artificial; identical to SEQ ID NO: 288438
  Synthetic oligonucleotide

SEQ ID NO: 658555 - DNA, 55 bp, Artificial; identical to SEQ ID NO: 288436
  Synthetic oligonucleotide

SEQ ID NO: 658556 - DNA, 52 bp, Artificial; identical to SEQ ID NO: 294059
  Synthetic oligonucleotide

SEQ ID NO: 658557 - DNA, 55 bp, Artificial; identical to SEQ ID NO: 288434
  Synthetic oligonucleotide

SEQ ID NO: 658558 - DNA, 54 bp, Artificial; identical to SEQ ID NO: 288433
  Synthetic oligonucleotide

SEQ ID NO: 658559 - DNA, 55 bp, Artificial; identical to SEQ ID NO: 288358
  Synthetic oligonucleotide

SEQ ID NO: 658560 - DNA, 55 bp, Artificial; identical to SEQ ID NO: 288357
  Synthetic oligonucleotide

SEQ ID NO: 658561 - DNA, 54 bp, Artificial; identical to SEQ ID NO: 293057
  Synthetic oligonucleotide

SEQ ID NO: 658562 - DNA, 55 bp, Artificial; identical to SEQ ID NO: 288356
  Synthetic oligonucleotide

SEQ ID NO: 658563 - DNA, 55 bp, Artificial; identical to SEQ ID NO: 288355
  Synthetic oligonucleotide

SEQ ID NO: 658564 - DNA, 55 bp, Artificial; identical to SEQ ID NO: 288353
  Synthetic oligonucleotide

SEQ ID NO: 658565 - DNA, 53 bp, Artificial; identical to SEQ ID NO: 293913
  Synthetic oligonucleotide

SEQ ID NO: 658566 - DNA, 54 bp, Artificial; identical to SEQ ID NO: 293081
  Synthetic oligonucleotide

SEQ ID NO: 658567 - DNA, 55 bp, Artificial; identical to SEQ ID NO: 288347
  Synthetic oligonucleotide

SEQ ID NO: 658568 - DNA, 54 bp, Artificial; identical to SEQ ID NO: 288346
  Synthetic oligonucleotide

SEQ ID NO: 658569 - DNA, 55 bp, Artificial; identical to SEQ ID NO: 288345
  Synthetic oligonucleotide

SEQ ID NO: 658570 - DNA, 55 bp, Artificial; identical to SEQ ID NO: 288343
  Synthetic oligonucleotide

SEQ ID NO: 658571 - DNA, 50 bp, Artificial; identical to SEQ ID NO: 286956
  Synthetic oligonucleotide

SEQ ID NO: 658572 - DNA, 55 bp, Artificial; identical to SEQ ID NO: 288342
  Synthetic oligonucleotide

SEQ ID NO: 658573 - DNA, 55 bp, Artificial; identical to SEQ ID NO: 288341
  Synthetic oligonucleotide

SEQ ID NO: 658574 - DNA, 53 bp, Artificial; identical to SEQ ID NO: 288340
  Synthetic oligonucleotide

SEQ ID NO: 658575 - DNA, 58 bp, Artificial; identical to SEQ ID NO: 295893
  Synthetic oligonucleotide

SEQ ID NO: 658576 - DNA, 55 bp, Artificial; identical to SEQ ID NO: 288334
  Synthetic oligonucleotide

SEQ ID NO: 658577 - DNA, 55 bp, Artificial; identical to SEQ ID NO: 288333
  Synthetic oligonucleotide

SEQ ID NO: 658578 - DNA, 55 bp, Artificial; identical to SEQ ID NO: 288332
  Synthetic oligonucleotide

SEQ ID NO: 658579 - DNA, 55 bp, Artificial; identical to SEQ ID NO: 288331
  Synthetic oligonucleotide

SEQ ID NO: 658580 - DNA, 55 bp, Artificial; identical to SEQ ID NO: 288330
  Synthetic oligonucleotide

SEQ ID NO: 658581 - DNA, 55 bp, Artificial; identical to SEQ ID NO: 288329
  Synthetic oligonucleotide

SEQ ID NO: 658582 - DNA, 55 bp, Artificial; identical to SEQ ID NO: 288328
  Synthetic oligonucleotide

SEQ ID NO: 658583 - DNA, 59 bp, Artificial; identical to SEQ ID NO: 294826
  Synthetic oligonucleotide

SEQ ID NO: 658584 - DNA, 55 bp, Artificial; identical to SEQ ID NO: 288392
  Synthetic oligonucleotide

SEQ ID NO: 658585 - DNA, 55 bp, Artificial; identical to SEQ ID NO: 288391
  Synthetic oligonucleotide

SEQ ID NO: 658586 - DNA, 54 bp, Artificial; identical to SEQ ID NO: 288381
  Synthetic oligonucleotide

SEQ ID NO: 658587 - DNA, 53 bp, Artificial; identical to SEQ ID NO: 288379
  Synthetic oligonucleotide

SEQ ID NO: 658588 - DNA, 55 bp, Artificial; identical to SEQ ID NO: 288378
  Synthetic oligonucleotide

SEQ ID NO: 658589 - DNA, 55 bp, Artificial; identical to SEQ ID NO: 288377
  Synthetic oligonucleotide

SEQ ID NO: 658590 - DNA, 55 bp, Artificial; identical to SEQ ID NO: 288374
  Synthetic oligonucleotide

SEQ ID NO: 658591 - DNA, 55 bp, Artificial; identical to SEQ ID NO: 288372
  Synthetic oligonucleotide

SEQ ID NO: 658592 - DNA, 53 bp, Artificial; identical to SEQ ID NO: 293876
  Synthetic oligonucleotide

SEQ ID NO: 658593 - DNA, 55 bp, Artificial; identical to SEQ ID NO: 288369
  Synthetic oligonucleotide

SEQ ID NO: 658594 - DNA, 54 bp, Artificial; identical to SEQ ID NO: 288368
  Synthetic oligonucleotide

SEQ ID NO: 658595 - DNA, 54 bp, Artificial; identical to SEQ ID NO: 293024
  Synthetic oligonucleotide

SEQ ID NO: 658596 - DNA, 55 bp, Artificial; identical to SEQ ID NO: 288366
  Synthetic oligonucleotide

SEQ ID NO: 658597 - DNA, 55 bp, Artificial; identical to SEQ ID NO: 288365
  Synthetic oligonucleotide

SEQ ID NO: 658598 - DNA, 55 bp, Artificial; identical to SEQ ID NO: 288364
  Synthetic oligonucleotide

SEQ ID NO: 658599 - DNA, 55 bp, Artificial; identical to SEQ ID NO: 288363
  Synthetic oligonucleotide

SEQ ID NO: 658600 - DNA, 55 bp, Artificial; identical to SEQ ID NO: 288359
  Synthetic oligonucleotide

SEQ ID NO: 658601 - DNA, 52 bp, Artificial; identical to SEQ ID NO: 294082
  Synthetic oligonucleotide

SEQ ID NO: 658602 - DNA, 53 bp, Artificial; identical to SEQ ID NO: 288566
  Synthetic oligonucleotide

SEQ ID NO: 658603 - DNA, 52 bp, Artificial; identical to SEQ ID NO: 288565
  Synthetic oligonucleotide

SEQ ID NO: 658604 - DNA, 55 bp, Artificial; identical to SEQ ID NO: 288564
  Synthetic oligonucleotide

SEQ ID NO: 658605 - DNA, 55 bp, Artificial; identical to SEQ ID NO: 288560
  Synthetic oligonucleotide

SEQ ID NO: 658606 - DNA, 50 bp, Artificial; identical to SEQ ID NO: 287056
  Synthetic oligonucleotide

SEQ ID NO: 658607 - DNA, 55 bp, Artificial; identical to SEQ ID NO: 288559
  Synthetic oligonucleotide

SEQ ID NO: 658608 - DNA, 54 bp, Artificial; identical to SEQ ID NO: 288558
  Synthetic oligonucleotide

SEQ ID NO: 658609 - DNA, 55 bp, Artificial; identical to SEQ ID NO: 288557
  Synthetic oligonucleotide

SEQ ID NO: 658610 - DNA, 55 bp, Artificial; identical to SEQ ID NO: 288556
  Synthetic oligonucleotide

SEQ ID NO: 658611 - DNA, 55 bp, Artificial; identical to SEQ ID NO: 288554
  Synthetic oligonucleotide

SEQ ID NO: 658612 - DNA, 54 bp, Artificial; identical to SEQ ID NO: 293007
  Synthetic oligonucleotide

SEQ ID NO: 658613 - DNA, 57 bp, Artificial; identical to SEQ ID NO: 292482
  Synthetic oligonucleotide

SEQ ID NO: 658614 - DNA, 52 bp, Artificial; identical to SEQ ID NO: 294041
  Synthetic oligonucleotide

SEQ ID NO: 658615 - DNA, 53 bp, Artificial; identical to SEQ ID NO: 293551
  Synthetic oligonucleotide

SEQ ID NO: 658616 - DNA, 55 bp, Artificial; identical to SEQ ID NO: 288552
  Synthetic oligonucleotide

SEQ ID NO: 658617 - DNA, 55 bp, Artificial; identical to SEQ ID NO: 288548
  Synthetic oligonucleotide

SEQ ID NO: 658618 - DNA, 54 bp, Artificial; identical to SEQ ID NO: 293100
  Synthetic oligonucleotide

SEQ ID NO: 658619 - DNA, 55 bp, Artificial; identical to SEQ ID NO: 288544
  Synthetic oligonucleotide

SEQ ID NO: 658620 - DNA, 55 bp, Artificial; identical to SEQ ID NO: 288543
  Synthetic oligonucleotide

SEQ ID NO: 658621 - DNA, 54 bp, Artificial; identical to SEQ ID NO: 293058
  Synthetic oligonucleotide

SEQ ID NO: 658622 - DNA, 55 bp, Artificial; identical to SEQ ID NO: 288538
  Synthetic oligonucleotide

SEQ ID NO: 658623 - DNA, 55 bp, Artificial; identical to SEQ ID NO: 288535
  Synthetic oligonucleotide

SEQ ID NO: 658624 - DNA, 55 bp, Artificial; identical to SEQ ID NO: 288534
  Synthetic oligonucleotide

SEQ ID NO: 658625 - DNA, 55 bp, Artificial; identical to SEQ ID NO: 288600
  Synthetic oligonucleotide

SEQ ID NO: 658626 - DNA, 53 bp, Artificial; identical to SEQ ID NO: 293573
  Synthetic oligonucleotide

SEQ ID NO: 658627 - DNA, 55 bp, Artificial; identical to SEQ ID NO: 288598
  Synthetic oligonucleotide

SEQ ID NO: 658628 - DNA, 55 bp, Artificial; identical to SEQ ID NO: 288596
  Synthetic oligonucleotide

SEQ ID NO: 658629 - DNA, 55 bp, Artificial; identical to SEQ ID NO: 288595
  Synthetic oligonucleotide

SEQ ID NO: 658630 - DNA, 55 bp, Artificial; identical to SEQ ID NO: 288593
  Synthetic oligonucleotide

SEQ ID NO: 658631 - DNA, 55 bp, Artificial; identical to SEQ ID NO: 288589
  Synthetic oligonucleotide

SEQ ID NO: 658632 - DNA, 55 bp, Artificial; identical to SEQ ID NO: 288588
  Synthetic oligonucleotide

SEQ ID NO: 658633 - DNA, 55 bp, Artificial; identical to SEQ ID NO: 288585
  Synthetic oligonucleotide

SEQ ID NO: 658634 - DNA, 55 bp, Artificial; identical to SEQ ID NO: 288580
  Synthetic oligonucleotide

SEQ ID NO: 658635 - DNA, 55 bp, Artificial; identical to SEQ ID NO: 288579
  Synthetic oligonucleotide

SEQ ID NO: 658636 - DNA, 55 bp, Artificial; identical to SEQ ID NO: 288573
  Synthetic oligonucleotide

SEQ ID NO: 658637 - DNA, 55 bp, Artificial; identical to SEQ ID NO: 288571
  Synthetic oligonucleotide

SEQ ID NO: 658638 - DNA, 55 bp, Artificial; identical to SEQ ID NO: 288490
  Synthetic oligonucleotide

SEQ ID NO: 658639 - DNA, 55 bp, Artificial; identical to SEQ ID NO: 288489
  Synthetic oligonucleotide

SEQ ID NO: 658640 - DNA, 55 bp, Artificial; identical to SEQ ID NO: 288487
  Synthetic oligonucleotide

SEQ ID NO: 658641 - DNA, 55 bp, Artificial; identical to SEQ ID NO: 288486
  Synthetic oligonucleotide

SEQ ID NO: 658642 - DNA, 55 bp, Artificial; identical to SEQ ID NO: 288482
  Synthetic oligonucleotide

SEQ ID NO: 658643 - DNA, 54 bp, Artificial; identical to SEQ ID NO: 293386
  Synthetic oligonucleotide

SEQ ID NO: 658644 - DNA, 55 bp, Artificial; identical to SEQ ID NO: 288480
  Synthetic oligonucleotide

SEQ ID NO: 658645 - DNA, 60 bp, Artificial; identical to SEQ ID NO: 292571
  Synthetic oligonucleotide

SEQ ID NO: 658646 - DNA, 55 bp, Artificial; identical to SEQ ID NO: 288478
  Synthetic oligonucleotide

SEQ ID NO: 658647 - DNA, 55 bp, Artificial; identical to SEQ ID NO: 288477
  Synthetic oligonucleotide

SEQ ID NO: 658648 - DNA, 54 bp, Artificial; identical to SEQ ID NO: 293431
  Synthetic oligonucleotide

SEQ ID NO: 658649 - DNA, 55 bp, Artificial; identical to SEQ ID NO: 288475
  Synthetic oligonucleotide

SEQ ID NO: 658650 - DNA, 55 bp, Artificial; identical to SEQ ID NO: 288474
  Synthetic oligonucleotide

SEQ ID NO: 658651 - DNA, 52 bp, Artificial; identical to SEQ ID NO: 294165
  Synthetic oligonucleotide

SEQ ID NO: 658652 - DNA, 55 bp, Artificial; identical to SEQ ID NO: 288470
  Synthetic oligonucleotide

SEQ ID NO: 658653 - DNA, 55 bp, Artificial; identical to SEQ ID NO: 288467
  Synthetic oligonucleotide

SEQ ID NO: 658654 - DNA, 55 bp, Artificial; identical to SEQ ID NO: 288466
  Synthetic oligonucleotide

SEQ ID NO: 658655 - DNA, 54 bp, Artificial; identical to SEQ ID NO: 292704
  Synthetic oligonucleotide

SEQ ID NO: 658656 - DNA, 51 bp, Artificial; identical to SEQ ID NO: 294944
  Synthetic oligonucleotide

SEQ ID NO: 658657 - DNA, 55 bp, Artificial; identical to SEQ ID NO: 288531
  Synthetic oligonucleotide

SEQ ID NO: 658658 - DNA, 55 bp, Artificial; identical to SEQ ID NO: 288530
  Synthetic oligonucleotide

SEQ ID NO: 658659 - DNA, 55 bp, Artificial; identical to SEQ ID NO: 288529
  Synthetic oligonucleotide

SEQ ID NO: 658660 - DNA, 55 bp, Artificial; identical to SEQ ID NO: 288525
  Synthetic oligonucleotide

SEQ ID NO: 658661 - DNA, 55 bp, Artificial; identical to SEQ ID NO: 288523
  Synthetic oligonucleotide

SEQ ID NO: 658662 - DNA, 55 bp, Artificial; identical to SEQ ID NO: 288521
  Synthetic oligonucleotide

SEQ ID NO: 658663 - DNA, 55 bp, Artificial; identical to SEQ ID NO: 288520
  Synthetic oligonucleotide

SEQ ID NO: 658664 - DNA, 55 bp, Artificial; identical to SEQ ID NO: 288518
  Synthetic oligonucleotide

SEQ ID NO: 658665 - DNA, 55 bp, Artificial; identical to SEQ ID NO: 288515
  Synthetic oligonucleotide

SEQ ID NO: 658666 - DNA, 56 bp, Artificial; identical to SEQ ID NO: 292861
  Synthetic oligonucleotide

SEQ ID NO: 658667 - DNA, 55 bp, Artificial; identical to SEQ ID NO: 288510
  Synthetic oligonucleotide

SEQ ID NO: 658668 - DNA, 55 bp, Artificial; identical to SEQ ID NO: 288509
  Synthetic oligonucleotide

SEQ ID NO: 658669 - DNA, 54 bp, Artificial; identical to SEQ ID NO: 288508
  Synthetic oligonucleotide

SEQ ID NO: 658670 - DNA, 55 bp, Artificial; identical to SEQ ID NO: 288507
  Synthetic oligonucleotide

SEQ ID NO: 658671 - DNA, 55 bp, Artificial; identical to SEQ ID NO: 288506
  Synthetic oligonucleotide

SEQ ID NO: 658672 - DNA, 50 bp, Artificial; identical to SEQ ID NO: 297136
  Synthetic oligonucleotide

SEQ ID NO: 658673 - DNA, 54 bp, Artificial; identical to SEQ ID NO: 288504
  Synthetic oligonucleotide

SEQ ID NO: 658674 - DNA, 55 bp, Artificial; identical to SEQ ID NO: 288503
  Synthetic oligonucleotide

SEQ ID NO: 658675 - DNA, 51 bp, Artificial; identical to SEQ ID NO: 294819
  Synthetic oligonucleotide

SEQ ID NO: 658676 - DNA, 55 bp, Artificial; identical to SEQ ID NO: 288502
  Synthetic oligonucleotide

SEQ ID NO: 658677 - DNA, 52 bp, Artificial; identical to SEQ ID NO: 293979
  Synthetic oligonucleotide

SEQ ID NO: 658678 - DNA, 55 bp, Artificial; identical to SEQ ID NO: 288499
  Synthetic oligonucleotide

SEQ ID NO: 658679 - DNA, 55 bp, Artificial; identical to SEQ ID NO: 288151
  Synthetic oligonucleotide

SEQ ID NO: 658680 - DNA, 55 bp, Artificial; identical to SEQ ID NO: 288150
  Synthetic oligonucleotide

SEQ ID NO: 658681 - DNA, 55 bp, Artificial; identical to SEQ ID NO: 288145
  Synthetic oligonucleotide

SEQ ID NO: 658682 - DNA, 55 bp, Artificial; identical to SEQ ID NO: 288143
  Synthetic oligonucleotide

SEQ ID NO: 658683 - DNA, 60 bp, Artificial; identical to SEQ ID NO: 292994
  Synthetic oligonucleotide

SEQ ID NO: 658684 - DNA, 52 bp, Artificial; identical to SEQ ID NO: 293999
  Synthetic oligonucleotide

SEQ ID NO: 658685 - DNA, 51 bp, Artificial; identical to SEQ ID NO: 294867
  Synthetic oligonucleotide

SEQ ID NO: 658686 - DNA, 55 bp, Artificial; identical to SEQ ID NO: 288141
  Synthetic oligonucleotide

SEQ ID NO: 658687 - DNA, 55 bp, Artificial; identical to SEQ ID NO: 288137
  Synthetic oligonucleotide

SEQ ID NO: 658688 - DNA, 55 bp, Artificial; identical to SEQ ID NO: 288136
  Synthetic oligonucleotide

SEQ ID NO: 658689 - DNA, 55 bp, Artificial; identical to SEQ ID NO: 288135
  Synthetic oligonucleotide

SEQ ID NO: 658690 - DNA, 55 bp, Artificial; identical to SEQ ID NO: 288129
  Synthetic oligonucleotide

SEQ ID NO: 658691 - DNA, 55 bp, Artificial; identical to SEQ ID NO: 288125
  Synthetic oligonucleotide

SEQ ID NO: 658692 - DNA, 55 bp, Artificial; identical to SEQ ID NO: 288123
  Synthetic oligonucleotide

SEQ ID NO: 658693 - DNA, 55 bp, Artificial; identical to SEQ ID NO: 288121
  Synthetic oligonucleotide

SEQ ID NO: 658694 - DNA, 55 bp, Artificial; identical to SEQ ID NO: 288187
  Synthetic oligonucleotide

SEQ ID NO: 658695 - DNA, 55 bp, Artificial; identical to SEQ ID NO: 288181
  Synthetic oligonucleotide

SEQ ID NO: 658696 - DNA, 55 bp, Artificial; identical to SEQ ID NO: 288180
  Synthetic oligonucleotide

SEQ ID NO: 658697 - DNA, 55 bp, Artificial; identical to SEQ ID NO: 288179
  Synthetic oligonucleotide

SEQ ID NO: 658698 - DNA, 55 bp, Artificial; identical to SEQ ID NO: 288175
  Synthetic oligonucleotide

SEQ ID NO: 658699 - DNA, 55 bp, Artificial; identical to SEQ ID NO: 288174
  Synthetic oligonucleotide

SEQ ID NO: 658700 - DNA, 55 bp, Artificial; identical to SEQ ID NO: 288172
  Synthetic oligonucleotide

SEQ ID NO: 658701 - DNA, 55 bp, Artificial; identical to SEQ ID NO: 288168
  Synthetic oligonucleotide

SEQ ID NO: 658702 - DNA, 55 bp, Artificial; identical to SEQ ID NO: 288166
  Synthetic oligonucleotide

SEQ ID NO: 658703 - DNA, 54 bp, Artificial; identical to SEQ ID NO: 293213
  Synthetic oligonucleotide

SEQ ID NO: 658704 - DNA, 55 bp, Artificial; identical to SEQ ID NO: 288165
  Synthetic oligonucleotide

SEQ ID NO: 658705 - DNA, 55 bp, Artificial; identical to SEQ ID NO: 288164
  Synthetic oligonucleotide

SEQ ID NO: 658706 - DNA, 55 bp, Artificial; identical to SEQ ID NO: 288163
  Synthetic oligonucleotide

SEQ ID NO: 658707 - DNA, 55 bp, Artificial; identical to SEQ ID NO: 288162
  Synthetic oligonucleotide

SEQ ID NO: 658708 - DNA, 55 bp, Artificial; identical to SEQ ID NO: 288161
  Synthetic oligonucleotide

SEQ ID NO: 658709 - DNA, 55 bp, Artificial; identical to SEQ ID NO: 288081
  Synthetic oligonucleotide

SEQ ID NO: 658710 - DNA, 55 bp, Artificial; identical to SEQ ID NO: 288078
  Synthetic oligonucleotide

SEQ ID NO: 658711 - DNA, 55 bp, Artificial; identical to SEQ ID NO: 288077
  Synthetic oligonucleotide

SEQ ID NO: 658712 - DNA, 57 bp, Artificial; identical to SEQ ID NO: 296671
  Synthetic oligonucleotide

SEQ ID NO: 658713 - DNA, 55 bp, Artificial; identical to SEQ ID NO: 288073
  Synthetic oligonucleotide

SEQ ID NO: 658714 - DNA, 53 bp, Artificial; identical to SEQ ID NO: 293470
  Synthetic oligonucleotide

SEQ ID NO: 658715 - DNA, 55 bp, Artificial; identical to SEQ ID NO: 288066
  Synthetic oligonucleotide

SEQ ID NO: 658716 - DNA, 55 bp, Artificial; identical to SEQ ID NO: 288065
  Synthetic oligonucleotide

SEQ ID NO: 658717 - DNA, 55 bp, Artificial; identical to SEQ ID NO: 288064
  Synthetic oligonucleotide

SEQ ID NO: 658718 - DNA, 55 bp, Artificial; identical to SEQ ID NO: 288061
  Synthetic oligonucleotide

SEQ ID NO: 658719 - DNA, 54 bp, Artificial; identical to SEQ ID NO: 288058
  Synthetic oligonucleotide

SEQ ID NO: 658720 - DNA, 55 bp, Artificial; identical to SEQ ID NO: 288057
  Synthetic oligonucleotide

SEQ ID NO: 658721 - DNA, 58 bp, Artificial; identical to SEQ ID NO: 288116
  Synthetic oligonucleotide

SEQ ID NO: 658722 - DNA, 55 bp, Artificial; identical to SEQ ID NO: 288054
  Synthetic oligonucleotide

SEQ ID NO: 658723 - DNA, 55 bp, Artificial; identical to SEQ ID NO: 288053
  Synthetic oligonucleotide

SEQ ID NO: 658724 - DNA, 55 bp, Artificial; identical to SEQ ID NO: 288050
  Synthetic oligonucleotide

SEQ ID NO: 658725 - DNA, 55 bp, Artificial; identical to SEQ ID NO: 288115
  Synthetic oligonucleotide

SEQ ID NO: 658726 - DNA, 55 bp, Artificial; identical to SEQ ID NO: 288113
  Synthetic oligonucleotide

SEQ ID NO: 658727 - DNA, 55 bp, Artificial; identical to SEQ ID NO: 288111
  Synthetic oligonucleotide

SEQ ID NO: 658728 - DNA, 55 bp, Artificial; identical to SEQ ID NO: 288108
  Synthetic oligonucleotide

SEQ ID NO: 658729 - DNA, 55 bp, Artificial; identical to SEQ ID NO: 288106
  Synthetic oligonucleotide

SEQ ID NO: 658730 - DNA, 50 bp, Artificial; identical to SEQ ID NO: 287022
  Synthetic oligonucleotide

SEQ ID NO: 658731 - DNA, 55 bp, Artificial; identical to SEQ ID NO: 288104
  Synthetic oligonucleotide

SEQ ID NO: 658732 - DNA, 55 bp, Artificial; identical to SEQ ID NO: 288102
  Synthetic oligonucleotide

SEQ ID NO: 658733 - DNA, 55 bp, Artificial; identical to SEQ ID NO: 288099
  Synthetic oligonucleotide

SEQ ID NO: 658734 - DNA, 55 bp, Artificial; identical to SEQ ID NO: 288098
  Synthetic oligonucleotide

SEQ ID NO: 658735 - DNA, 55 bp, Artificial; identical to SEQ ID NO: 288096
  Synthetic oligonucleotide

SEQ ID NO: 658736 - DNA, 52 bp, Artificial; identical to SEQ ID NO: 294325
  Synthetic oligonucleotide

SEQ ID NO: 658737 - DNA, 55 bp, Artificial; identical to SEQ ID NO: 288092
  Synthetic oligonucleotide

SEQ ID NO: 658738 - DNA, 55 bp, Artificial; identical to SEQ ID NO: 288091
  Synthetic oligonucleotide

SEQ ID NO: 658739 - DNA, 55 bp, Artificial; identical to SEQ ID NO: 288090
  Synthetic oligonucleotide

SEQ ID NO: 658740 - DNA, 55 bp, Artificial; identical to SEQ ID NO: 288088
  Synthetic oligonucleotide

SEQ ID NO: 658741 - DNA, 55 bp, Artificial; identical to SEQ ID NO: 288087
  Synthetic oligonucleotide

SEQ ID NO: 658742 - DNA, 55 bp, Artificial; identical to SEQ ID NO: 288086
  Synthetic oligonucleotide

SEQ ID NO: 658743 - DNA, 55 bp, Artificial; identical to SEQ ID NO: 288085
  Synthetic oligonucleotide

SEQ ID NO: 658744 - DNA, 55 bp, Artificial; identical to SEQ ID NO: 288084
  Synthetic oligonucleotide

SEQ ID NO: 658745 - DNA, 55 bp, Artificial; identical to SEQ ID NO: 288082
  Synthetic oligonucleotide

SEQ ID NO: 658746 - DNA, 55 bp, Artificial; identical to SEQ ID NO: 288288
  Synthetic oligonucleotide

SEQ ID NO: 658747 - DNA, 55 bp, Artificial; identical to SEQ ID NO: 288287
  Synthetic oligonucleotide

SEQ ID NO: 658748 - DNA, 55 bp, Artificial; identical to SEQ ID NO: 288286
  Synthetic oligonucleotide

SEQ ID NO: 658749 - DNA, 55 bp, Artificial; identical to SEQ ID NO: 288284
  Synthetic oligonucleotide

SEQ ID NO: 658750 - DNA, 55 bp, Artificial; identical to SEQ ID NO: 288283
  Synthetic oligonucleotide

SEQ ID NO: 658751 - DNA, 55 bp, Artificial; identical to SEQ ID NO: 288279
  Synthetic oligonucleotide

SEQ ID NO: 658752 - DNA, 55 bp, Artificial; identical to SEQ ID NO: 288278
  Synthetic oligonucleotide

SEQ ID NO: 658753 - DNA, 55 bp, Artificial; identical to SEQ ID NO: 288276
  Synthetic oligonucleotide

SEQ ID NO: 658754 - DNA, 55 bp, Artificial; identical to SEQ ID NO: 288275
  Synthetic oligonucleotide

SEQ ID NO: 658755 - DNA, 55 bp, Artificial; identical to SEQ ID NO: 288274
  Synthetic oligonucleotide

SEQ ID NO: 658756 - DNA, 55 bp, Artificial; identical to SEQ ID NO: 288266
  Synthetic oligonucleotide

SEQ ID NO: 658757 - DNA, 55 bp, Artificial; identical to SEQ ID NO: 288264
  Synthetic oligonucleotide

SEQ ID NO: 658758 - DNA, 50 bp, Artificial; identical to SEQ ID NO: 297278
  Synthetic oligonucleotide

SEQ ID NO: 658759 - DNA, 55 bp, Artificial; identical to SEQ ID NO: 288263
  Synthetic oligonucleotide

SEQ ID NO: 658760 - DNA, 55 bp, Artificial; identical to SEQ ID NO: 288257
  Synthetic oligonucleotide

SEQ ID NO: 658761 - DNA, 55 bp, Artificial; identical to SEQ ID NO: 288324
  Synthetic oligonucleotide

SEQ ID NO: 658762 - DNA, 55 bp, Artificial; identical to SEQ ID NO: 288319
  Synthetic oligonucleotide

SEQ ID NO: 658763 - DNA, 55 bp, Artificial; identical to SEQ ID NO: 288318
  Synthetic oligonucleotide

SEQ ID NO: 658764 - DNA, 55 bp, Artificial; identical to SEQ ID NO: 288313
  Synthetic oligonucleotide

SEQ ID NO: 658765 - DNA, 55 bp, Artificial; identical to SEQ ID NO: 288310
  Synthetic oligonucleotide

SEQ ID NO: 658766 - DNA, 55 bp, Artificial; identical to SEQ ID NO: 288307
  Synthetic oligonucleotide

SEQ ID NO: 658767 - DNA, 55 bp, Artificial; identical to SEQ ID NO: 288304
  Synthetic oligonucleotide

SEQ ID NO: 658768 - DNA, 55 bp, Artificial; identical to SEQ ID NO: 288303
  Synthetic oligonucleotide

SEQ ID NO: 658769 - DNA, 53 bp, Artificial; identical to SEQ ID NO: 293878
  Synthetic oligonucleotide

SEQ ID NO: 658770 - DNA, 55 bp, Artificial; identical to SEQ ID NO: 288300
  Synthetic oligonucleotide

SEQ ID NO: 658771 - DNA, 56 bp, Artificial; identical to SEQ ID NO: 295582
  Synthetic oligonucleotide

SEQ ID NO: 658772 - DNA, 55 bp, Artificial; identical to SEQ ID NO: 288296
  Synthetic oligonucleotide

SEQ ID NO: 658773 - DNA, 55 bp, Artificial; identical to SEQ ID NO: 288295
  Synthetic oligonucleotide

SEQ ID NO: 658774 - DNA, 55 bp, Artificial; identical to SEQ ID NO: 288292
  Synthetic oligonucleotide

SEQ ID NO: 658775 - DNA, 55 bp, Artificial; identical to SEQ ID NO: 288291
  Synthetic oligonucleotide

SEQ ID NO: 658776 - DNA, 55 bp, Artificial; identical to SEQ ID NO: 288219
  Synthetic oligonucleotide

SEQ ID NO: 658777 - DNA, 55 bp, Artificial; identical to SEQ ID NO: 288218
  Synthetic oligonucleotide

SEQ ID NO: 658778 - DNA, 55 bp, Artificial; identical to SEQ ID NO: 288215
  Synthetic oligonucleotide

SEQ ID NO: 658779 - DNA, 55 bp, Artificial; identical to SEQ ID NO: 288213
  Synthetic oligonucleotide

SEQ ID NO: 658780 - DNA, 55 bp, Artificial; identical to SEQ ID NO: 288212
  Synthetic oligonucleotide

SEQ ID NO: 658781 - DNA, 55 bp, Artificial; identical to SEQ ID NO: 288211
  Synthetic oligonucleotide

SEQ ID NO: 658782 - DNA, 55 bp, Artificial; identical to SEQ ID NO: 288209
  Synthetic oligonucleotide

SEQ ID NO: 658783 - DNA, 55 bp, Artificial; identical to SEQ ID NO: 288208
  Synthetic oligonucleotide

SEQ ID NO: 658784 - DNA, 60 bp, Artificial; identical to SEQ ID NO: 288783
  Synthetic oligonucleotide

SEQ ID NO: 658785 - DNA, 55 bp, Artificial; identical to SEQ ID NO: 288207
  Synthetic oligonucleotide

SEQ ID NO: 658786 - DNA, 55 bp, Artificial; identical to SEQ ID NO: 288206
  Synthetic oligonucleotide

SEQ ID NO: 658787 - DNA, 55 bp, Artificial; identical to SEQ ID NO: 288203
  Synthetic oligonucleotide

SEQ ID NO: 658788 - DNA, 55 bp, Artificial; identical to SEQ ID NO: 288202
  Synthetic oligonucleotide

SEQ ID NO: 658789 - DNA, 55 bp, Artificial; identical to SEQ ID NO: 288201
  Synthetic oligonucleotide

SEQ ID NO: 658790 - DNA, 55 bp, Artificial; identical to SEQ ID NO: 288200
  Synthetic oligonucleotide

SEQ ID NO: 658791 - DNA, 55 bp, Artificial; identical to SEQ ID NO: 288198
  Synthetic oligonucleotide

SEQ ID NO: 658792 - DNA, 55 bp, Artificial; identical to SEQ ID NO: 288196
  Synthetic oligonucleotide

SEQ ID NO: 658793 - DNA, 55 bp, Artificial; identical to SEQ ID NO: 288193
  Synthetic oligonucleotide

SEQ ID NO: 658794 - DNA, 55 bp, Artificial; identical to SEQ ID NO: 288192
  Synthetic oligonucleotide

SEQ ID NO: 658795 - DNA, 55 bp, Artificial; identical to SEQ ID NO: 288190
  Synthetic oligonucleotide

SEQ ID NO: 658796 - DNA, 55 bp, Artificial; identical to SEQ ID NO: 288188
  Synthetic oligonucleotide

SEQ ID NO: 658797 - DNA, 55 bp, Artificial; identical to SEQ ID NO: 288253
  Synthetic oligonucleotide

SEQ ID NO: 658798 - DNA, 51 bp, Artificial; identical to SEQ ID NO: 294525
  Synthetic oligonucleotide

SEQ ID NO: 658799 - DNA, 55 bp, Artificial; identical to SEQ ID NO: 288252
  Synthetic oligonucleotide

SEQ ID NO: 658800 - DNA, 53 bp, Artificial; identical to SEQ ID NO: 293640
  Synthetic oligonucleotide

SEQ ID NO: 658801 - DNA, 55 bp, Artificial; identical to SEQ ID NO: 288250
  Synthetic oligonucleotide

SEQ ID NO: 658802 - DNA, 55 bp, Artificial; identical to SEQ ID NO: 288248
  Synthetic oligonucleotide

SEQ ID NO: 658803 - DNA, 53 bp, Artificial; identical to SEQ ID NO: 288247
  Synthetic oligonucleotide

SEQ ID NO: 658804 - DNA, 53 bp, Artificial; identical to SEQ ID NO: 293628
  Synthetic oligonucleotide

SEQ ID NO: 658805 - DNA, 55 bp, Artificial; identical to SEQ ID NO: 288243
  Synthetic oligonucleotide

SEQ ID NO: 658806 - DNA, 55 bp, Artificial; identical to SEQ ID NO: 288242
  Synthetic oligonucleotide

SEQ ID NO: 658807 - DNA, 55 bp, Artificial; identical to SEQ ID NO: 288240
  Synthetic oligonucleotide

SEQ ID NO: 658808 - DNA, 55 bp, Artificial; identical to SEQ ID NO: 288237
  Synthetic oligonucleotide

SEQ ID NO: 658809 - DNA, 55 bp, Artificial; identical to SEQ ID NO: 288236
  Synthetic oligonucleotide

SEQ ID NO: 658810 - DNA, 57 bp, Artificial; identical to SEQ ID NO: 296660
  Synthetic oligonucleotide

SEQ ID NO: 658811 - DNA, 55 bp, Artificial; identical to SEQ ID NO: 288232
  Synthetic oligonucleotide

SEQ ID NO: 658812 - DNA, 55 bp, Artificial; identical to SEQ ID NO: 288231
  Synthetic oligonucleotide

SEQ ID NO: 658813 - DNA, 55 bp, Artificial; identical to SEQ ID NO: 288230
  Synthetic oligonucleotide

SEQ ID NO: 658814 - DNA, 55 bp, Artificial; identical to SEQ ID NO: 288229
  Synthetic oligonucleotide

SEQ ID NO: 658815 - DNA, 55 bp, Artificial; identical to SEQ ID NO: 288990
  Synthetic oligonucleotide

SEQ ID NO: 658816 - DNA, 55 bp, Artificial; identical to SEQ ID NO: 288989
  Synthetic oligonucleotide

SEQ ID NO: 658817 - DNA, 54 bp, Artificial; identical to SEQ ID NO: 288987
  Synthetic oligonucleotide

SEQ ID NO: 658818 - DNA, 55 bp, Artificial; identical to SEQ ID NO: 288986
  Synthetic oligonucleotide

SEQ ID NO: 658819 - DNA, 55 bp, Artificial; identical to SEQ ID NO: 288985
  Synthetic oligonucleotide

SEQ ID NO: 658820 - DNA, 55 bp, Artificial; identical to SEQ ID NO: 288984
  Synthetic oligonucleotide

SEQ ID NO: 658821 - DNA, 53 bp, Artificial; identical to SEQ ID NO: 293703
  Synthetic oligonucleotide

SEQ ID NO: 658822 - DNA, 50 bp, Artificial; identical to SEQ ID NO: 295949
  Synthetic oligonucleotide

SEQ ID NO: 658823 - DNA, 53 bp, Artificial; identical to SEQ ID NO: 293694
  Synthetic oligonucleotide

SEQ ID NO: 658824 - DNA, 55 bp, Artificial; identical to SEQ ID NO: 288980
  Synthetic oligonucleotide

SEQ ID NO: 658825 - DNA, 52 bp, Artificial; identical to SEQ ID NO: 294267
  Synthetic oligonucleotide

SEQ ID NO: 658826 - DNA, 51 bp, Artificial; identical to SEQ ID NO: 294722
  Synthetic oligonucleotide

SEQ ID NO: 658827 - DNA, 55 bp, Artificial; identical to SEQ ID NO: 288977
  Synthetic oligonucleotide

SEQ ID NO: 658828 - DNA, 55 bp, Artificial; identical to SEQ ID NO: 288976
  Synthetic oligonucleotide

SEQ ID NO: 658829 - DNA, 55 bp, Artificial; identical to SEQ ID NO: 288974
  Synthetic oligonucleotide

SEQ ID NO: 658830 - DNA, 55 bp, Artificial; identical to SEQ ID NO: 288971
  Synthetic oligonucleotide

SEQ ID NO: 658831 - DNA, 52 bp, Artificial; identical to SEQ ID NO: 294252
  Synthetic oligonucleotide

SEQ ID NO: 658832 - DNA, 55 bp, Artificial; identical to SEQ ID NO: 288965
  Synthetic oligonucleotide

SEQ ID NO: 658833 - DNA, 55 bp, Artificial; identical to SEQ ID NO: 288964
  Synthetic oligonucleotide

SEQ ID NO: 658834 - DNA, 55 bp, Artificial; identical to SEQ ID NO: 288962
  Synthetic oligonucleotide

SEQ ID NO: 658835 - DNA, 55 bp, Artificial; identical to SEQ ID NO: 289024
  Synthetic oligonucleotide

SEQ ID NO: 658836 - DNA, 55 bp, Artificial; identical to SEQ ID NO: 289020
  Synthetic oligonucleotide

SEQ ID NO: 658837 - DNA, 55 bp, Artificial; identical to SEQ ID NO: 289015
  Synthetic oligonucleotide

SEQ ID NO: 658838 - DNA, 55 bp, Artificial; identical to SEQ ID NO: 289011
  Synthetic oligonucleotide

SEQ ID NO: 658839 - DNA, 55 bp, Artificial; identical to SEQ ID NO: 289009
  Synthetic oligonucleotide

SEQ ID NO: 658840 - DNA, 55 bp, Artificial; identical to SEQ ID NO: 289008
  Synthetic oligonucleotide

SEQ ID NO: 658841 - DNA, 60 bp, Artificial; identical to SEQ ID NO: 288516
  Synthetic oligonucleotide

SEQ ID NO: 658842 - DNA, 52 bp, Artificial; identical to SEQ ID NO: 294256
  Synthetic oligonucleotide

SEQ ID NO: 658843 - DNA, 55 bp, Artificial; identical to SEQ ID NO: 289004
  Synthetic oligonucleotide

SEQ ID NO: 658844 - DNA, 55 bp, Artificial; identical to SEQ ID NO: 289001
  Synthetic oligonucleotide

SEQ ID NO: 658845 - DNA, 55 bp, Artificial; identical to SEQ ID NO: 288996
  Synthetic oligonucleotide

SEQ ID NO: 658846 - DNA, 55 bp, Artificial; identical to SEQ ID NO: 288995
  Synthetic oligonucleotide

SEQ ID NO: 658847 - DNA, 54 bp, Artificial; identical to SEQ ID NO: 288993
  Synthetic oligonucleotide

SEQ ID NO: 658848 - DNA, 53 bp, Artificial; identical to SEQ ID NO: 293631
  Synthetic oligonucleotide

SEQ ID NO: 658849 - DNA, 55 bp, Artificial; identical to SEQ ID NO: 288992
  Synthetic oligonucleotide

SEQ ID NO: 658850 - DNA, 55 bp, Artificial; identical to SEQ ID NO: 288920
  Synthetic oligonucleotide

SEQ ID NO: 658851 - DNA, 53 bp, Artificial; identical to SEQ ID NO: 293637
  Synthetic oligonucleotide

SEQ ID NO: 658852 - DNA, 55 bp, Artificial; identical to SEQ ID NO: 288917
  Synthetic oligonucleotide

SEQ ID NO: 658853 - DNA, 55 bp, Artificial; identical to SEQ ID NO: 288915
  Synthetic oligonucleotide

SEQ ID NO: 658854 - DNA, 53 bp, Artificial; identical to SEQ ID NO: 293616
  Synthetic oligonucleotide

SEQ ID NO: 658855 - DNA, 55 bp, Artificial; identical to SEQ ID NO: 288912
  Synthetic oligonucleotide

SEQ ID NO: 658856 - DNA, 55 bp, Artificial; identical to SEQ ID NO: 288910
  Synthetic oligonucleotide

SEQ ID NO: 658857 - DNA, 52 bp, Artificial; identical to SEQ ID NO: 296015
  Synthetic oligonucleotide

SEQ ID NO: 658858 - DNA, 55 bp, Artificial; identical to SEQ ID NO: 288907
  Synthetic oligonucleotide

SEQ ID NO: 658859 - DNA, 55 bp, Artificial; identical to SEQ ID NO: 288903
  Synthetic oligonucleotide

SEQ ID NO: 658860 - DNA, 55 bp, Artificial; identical to SEQ ID NO: 288902
  Synthetic oligonucleotide

SEQ ID NO: 658861 - DNA, 55 bp, Artificial; identical to SEQ ID NO: 288899
  Synthetic oligonucleotide

SEQ ID NO: 658862 - DNA, 55 bp, Artificial; identical to SEQ ID NO: 288898
  Synthetic oligonucleotide

SEQ ID NO: 658863 - DNA, 51 bp, Artificial; identical to SEQ ID NO: 294766
  Synthetic oligonucleotide

SEQ ID NO: 658864 - DNA, 55 bp, Artificial; identical to SEQ ID NO: 288893
  Synthetic oligonucleotide

SEQ ID NO: 658865 - DNA, 55 bp, Artificial; identical to SEQ ID NO: 288892
  Synthetic oligonucleotide

SEQ ID NO: 658866 - DNA, 55 bp, Artificial; identical to SEQ ID NO: 288889
  Synthetic oligonucleotide

SEQ ID NO: 658867 - DNA, 55 bp, Artificial; identical to SEQ ID NO: 288888
  Synthetic oligonucleotide

SEQ ID NO: 658868 - DNA, 55 bp, Artificial; identical to SEQ ID NO: 288887
  Synthetic oligonucleotide

SEQ ID NO: 658869 - DNA, 55 bp, Artificial; identical to SEQ ID NO: 288955
  Synthetic oligonucleotide

SEQ ID NO: 658870 - DNA, 54 bp, Artificial; identical to SEQ ID NO: 293311
  Synthetic oligonucleotide

SEQ ID NO: 658871 - DNA, 55 bp, Artificial; identical to SEQ ID NO: 288954
  Synthetic oligonucleotide

SEQ ID NO: 658872 - DNA, 55 bp, Artificial; identical to SEQ ID NO: 288947
  Synthetic oligonucleotide

SEQ ID NO: 658873 - DNA, 51 bp, Artificial; identical to SEQ ID NO: 294756
  Synthetic oligonucleotide

SEQ ID NO: 658874 - DNA, 55 bp, Artificial; identical to SEQ ID NO: 288945
  Synthetic oligonucleotide

SEQ ID NO: 658875 - DNA, 55 bp, Artificial; identical to SEQ ID NO: 288943
  Synthetic oligonucleotide

SEQ ID NO: 658876 - DNA, 55 bp, Artificial; identical to SEQ ID NO: 288942
  Synthetic oligonucleotide

SEQ ID NO: 658877 - DNA, 52 bp, Artificial; identical to SEQ ID NO: 293737
  Synthetic oligonucleotide

SEQ ID NO: 658878 - DNA, 55 bp, Artificial; identical to SEQ ID NO: 288941
  Synthetic oligonucleotide

SEQ ID NO: 658879 - DNA, 55 bp, Artificial; identical to SEQ ID NO: 288939
  Synthetic oligonucleotide

SEQ ID NO: 658880 - DNA, 55 bp, Artificial; identical to SEQ ID NO: 288935
  Synthetic oligonucleotide

SEQ ID NO: 658881 - DNA, 55 bp, Artificial; identical to SEQ ID NO: 288934
  Synthetic oligonucleotide

SEQ ID NO: 658882 - DNA, 55 bp, Artificial; identical to SEQ ID NO: 288933
  Synthetic oligonucleotide

SEQ ID NO: 658883 - DNA, 54 bp, Artificial; identical to SEQ ID NO: 293268
  Synthetic oligonucleotide

SEQ ID NO: 658884 - DNA, 55 bp, Artificial; identical to SEQ ID NO: 295293
  Synthetic oligonucleotide

SEQ ID NO: 658885 - DNA, 54 bp, Artificial; identical to SEQ ID NO: 288928
  Synthetic oligonucleotide

SEQ ID NO: 658886 - DNA, 54 bp, Artificial; identical to SEQ ID NO: 288925
  Synthetic oligonucleotide

SEQ ID NO: 658887 - DNA, 55 bp, Artificial; identical to SEQ ID NO: 288924
  Synthetic oligonucleotide

SEQ ID NO: 658888 - DNA, 55 bp, Artificial; identical to SEQ ID NO: 288923
  Synthetic oligonucleotide

SEQ ID NO: 658889 - DNA, 55 bp, Artificial; identical to SEQ ID NO: 288922
  Synthetic oligonucleotide

SEQ ID NO: 658890 - DNA, 55 bp, Artificial; identical to SEQ ID NO: 289129
  Synthetic oligonucleotide

SEQ ID NO: 658891 - DNA, 55 bp, Artificial; identical to SEQ ID NO: 289128
  Synthetic oligonucleotide

SEQ ID NO: 658892 - DNA, 53 bp, Artificial; identical to SEQ ID NO: 293902
  Synthetic oligonucleotide

SEQ ID NO: 658893 - DNA, 57 bp, Artificial; identical to SEQ ID NO: 296070
  Synthetic oligonucleotide

SEQ ID NO: 658894 - DNA, 56 bp, Artificial; identical to SEQ ID NO: 296293
  Synthetic oligonucleotide

SEQ ID NO: 658895 - DNA, 55 bp, Artificial; identical to SEQ ID NO: 289113
  Synthetic oligonucleotide

SEQ ID NO: 658896 - DNA, 55 bp, Artificial; identical to SEQ ID NO: 289111
  Synthetic oligonucleotide

SEQ ID NO: 658897 - DNA, 55 bp, Artificial; identical to SEQ ID NO: 289109
  Synthetic oligonucleotide

SEQ ID NO: 658898 - DNA, 55 bp, Artificial; identical to SEQ ID NO: 289108
  Synthetic oligonucleotide

SEQ ID NO: 658899 - DNA, 54 bp, Artificial; identical to SEQ ID NO: 293281
  Synthetic oligonucleotide

SEQ ID NO: 658900 - DNA, 59 bp, Artificial; identical to SEQ ID NO: 294571
  Synthetic oligonucleotide

SEQ ID NO: 658901 - DNA, 55 bp, Artificial; identical to SEQ ID NO: 289106
  Synthetic oligonucleotide

SEQ ID NO: 658902 - DNA, 55 bp, Artificial; identical to SEQ ID NO: 289103
  Synthetic oligonucleotide

SEQ ID NO: 658903 - DNA, 55 bp, Artificial; identical to SEQ ID NO: 289102
  Synthetic oligonucleotide

SEQ ID NO: 658904 - DNA, 55 bp, Artificial; identical to SEQ ID NO: 289101
  Synthetic oligonucleotide

SEQ ID NO: 658905 - DNA, 54 bp, Artificial; identical to SEQ ID NO: 294915
  Synthetic oligonucleotide

SEQ ID NO: 658906 - DNA, 55 bp, Artificial; identical to SEQ ID NO: 289096
  Synthetic oligonucleotide

SEQ ID NO: 658907 - DNA, 58 bp, Artificial; identical to SEQ ID NO: 295971
  Synthetic oligonucleotide

SEQ ID NO: 658908 - DNA, 55 bp, Artificial; identical to SEQ ID NO: 289164
  Synthetic oligonucleotide

SEQ ID NO: 658909 - DNA, 55 bp, Artificial; identical to SEQ ID NO: 289163
  Synthetic oligonucleotide

SEQ ID NO: 658910 - DNA, 55 bp, Artificial; identical to SEQ ID NO: 289157
  Synthetic oligonucleotide

SEQ ID NO: 658911 - DNA, 51 bp, Artificial; identical to SEQ ID NO: 294775
  Synthetic oligonucleotide

SEQ ID NO: 658912 - DNA, 55 bp, Artificial; identical to SEQ ID NO: 289155
  Synthetic oligonucleotide

SEQ ID NO: 658913 - DNA, 55 bp, Artificial; identical to SEQ ID NO: 289154
  Synthetic oligonucleotide

SEQ ID NO: 658914 - DNA, 55 bp, Artificial; identical to SEQ ID NO: 289153
  Synthetic oligonucleotide

SEQ ID NO: 658915 - DNA, 51 bp, Artificial; identical to SEQ ID NO: 295002
  Synthetic oligonucleotide

SEQ ID NO: 658916 - DNA, 55 bp, Artificial; identical to SEQ ID NO: 289152
  Synthetic oligonucleotide

SEQ ID NO: 658917 - DNA, 55 bp, Artificial; identical to SEQ ID NO: 289148
  Synthetic oligonucleotide

SEQ ID NO: 658918 - DNA, 55 bp, Artificial; identical to SEQ ID NO: 289146
  Synthetic oligonucleotide

SEQ ID NO: 658919 - DNA, 51 bp, Artificial; identical to SEQ ID NO: 294953
  Synthetic oligonucleotide

SEQ ID NO: 658920 - DNA, 55 bp, Artificial; identical to SEQ ID NO: 289145
  Synthetic oligonucleotide

SEQ ID NO: 658921 - DNA, 52 bp, Artificial; identical to SEQ ID NO: 294321
  Synthetic oligonucleotide

SEQ ID NO: 658922 - DNA, 55 bp, Artificial; identical to SEQ ID NO: 289144
  Synthetic oligonucleotide

SEQ ID NO: 658923 - DNA, 60 bp, Artificial; identical to SEQ ID NO: 290493
  Synthetic oligonucleotide

SEQ ID NO: 658924 - DNA, 55 bp, Artificial; identical to SEQ ID NO: 289143
  Synthetic oligonucleotide

SEQ ID NO: 658925 - DNA, 55 bp, Artificial; identical to SEQ ID NO: 289142
  Synthetic oligonucleotide

SEQ ID NO: 658926 - DNA, 60 bp, Artificial; identical to SEQ ID NO: 290527
  Synthetic oligonucleotide

SEQ ID NO: 658927 - DNA, 55 bp, Artificial; identical to SEQ ID NO: 289140
  Synthetic oligonucleotide

SEQ ID NO: 658928 - DNA, 55 bp, Artificial; identical to SEQ ID NO: 289139
  Synthetic oligonucleotide

SEQ ID NO: 658929 - DNA, 55 bp, Artificial; identical to SEQ ID NO: 289137
  Synthetic oligonucleotide

SEQ ID NO: 658930 - DNA, 50 bp, Artificial; identical to SEQ ID NO: 295853
  Synthetic oligonucleotide

SEQ ID NO: 658931 - DNA, 54 bp, Artificial; identical to SEQ ID NO: 289135
  Synthetic oligonucleotide

SEQ ID NO: 658932 - DNA, 55 bp, Artificial; identical to SEQ ID NO: 289134
  Synthetic oligonucleotide

SEQ ID NO: 658933 - DNA, 55 bp, Artificial; identical to SEQ ID NO: 289133
  Synthetic oligonucleotide

SEQ ID NO: 658934 - DNA, 51 bp, Artificial; identical to SEQ ID NO: 294780
  Synthetic oligonucleotide

SEQ ID NO: 658935 - DNA, 55 bp, Artificial; identical to SEQ ID NO: 289132
  Synthetic oligonucleotide

SEQ ID NO: 658936 - DNA, 55 bp, Artificial; identical to SEQ ID NO: 289131
  Synthetic oligonucleotide

SEQ ID NO: 658937 - DNA, 55 bp, Artificial; identical to SEQ ID NO: 289057
  Synthetic oligonucleotide

SEQ ID NO: 658938 - DNA, 55 bp, Artificial; identical to SEQ ID NO: 289055
  Synthetic oligonucleotide

SEQ ID NO: 658939 - DNA, 55 bp, Artificial; identical to SEQ ID NO: 289054
  Synthetic oligonucleotide

SEQ ID NO: 658940 - DNA, 55 bp, Artificial; identical to SEQ ID NO: 289051
  Synthetic oligonucleotide

SEQ ID NO: 658941 - DNA, 55 bp, Artificial; identical to SEQ ID NO: 289047
  Synthetic oligonucleotide

SEQ ID NO: 658942 - DNA, 55 bp, Artificial; identical to SEQ ID NO: 289046
  Synthetic oligonucleotide

SEQ ID NO: 658943 - DNA, 55 bp, Artificial; identical to SEQ ID NO: 289044
  Synthetic oligonucleotide

SEQ ID NO: 658944 - DNA, 55 bp, Artificial; identical to SEQ ID NO: 289041
  Synthetic oligonucleotide

SEQ ID NO: 658945 - DNA, 55 bp, Artificial; identical to SEQ ID NO: 289040
  Synthetic oligonucleotide

SEQ ID NO: 658946 - DNA, 55 bp, Artificial; identical to SEQ ID NO: 289039
  Synthetic oligonucleotide

SEQ ID NO: 658947 - DNA, 55 bp, Artificial; identical to SEQ ID NO: 289037
  Synthetic oligonucleotide

SEQ ID NO: 658948 - DNA, 55 bp, Artificial; identical to SEQ ID NO: 289036
  Synthetic oligonucleotide

SEQ ID NO: 658949 - DNA, 53 bp, Artificial; identical to SEQ ID NO: 293873
  Synthetic oligonucleotide

SEQ ID NO: 658950 - DNA, 55 bp, Artificial; identical to SEQ ID NO: 289034
  Synthetic oligonucleotide

SEQ ID NO: 658951 - DNA, 55 bp, Artificial; identical to SEQ ID NO: 289030
  Synthetic oligonucleotide

SEQ ID NO: 658952 - DNA, 55 bp, Artificial; identical to SEQ ID NO: 289029
  Synthetic oligonucleotide

SEQ ID NO: 658953 - DNA, 55 bp, Artificial; identical to SEQ ID NO: 289028
  Synthetic oligonucleotide

SEQ ID NO: 658954 - DNA, 55 bp, Artificial; identical to SEQ ID NO: 289091
  Synthetic oligonucleotide

SEQ ID NO: 658955 - DNA, 55 bp, Artificial; identical to SEQ ID NO: 289087
  Synthetic oligonucleotide

SEQ ID NO: 658956 - DNA, 55 bp, Artificial; identical to SEQ ID NO: 289086
  Synthetic oligonucleotide

SEQ ID NO: 658957 - DNA, 55 bp, Artificial; identical to SEQ ID NO: 289081
  Synthetic oligonucleotide

SEQ ID NO: 658958 - DNA, 55 bp, Artificial; identical to SEQ ID NO: 289080
  Synthetic oligonucleotide

SEQ ID NO: 658959 - DNA, 51 bp, Artificial; identical to SEQ ID NO: 294895
  Synthetic oligonucleotide

SEQ ID NO: 658960 - DNA, 55 bp, Artificial; identical to SEQ ID NO: 289077
  Synthetic oligonucleotide

SEQ ID NO: 658961 - DNA, 55 bp, Artificial; identical to SEQ ID NO: 289076
  Synthetic oligonucleotide

SEQ ID NO: 658962 - DNA, 55 bp, Artificial; identical to SEQ ID NO: 289074
  Synthetic oligonucleotide

SEQ ID NO: 658963 - DNA, 55 bp, Artificial; identical to SEQ ID NO: 289073
  Synthetic oligonucleotide

SEQ ID NO: 658964 - DNA, 55 bp, Artificial; identical to SEQ ID NO: 289070
  Synthetic oligonucleotide

SEQ ID NO: 658965 - DNA, 55 bp, Artificial; identical to SEQ ID NO: 289068
  Synthetic oligonucleotide

SEQ ID NO: 658966 - DNA, 55 bp, Artificial; identical to SEQ ID NO: 289066
  Synthetic oligonucleotide

SEQ ID NO: 658967 - DNA, 55 bp, Artificial; identical to SEQ ID NO: 289065
  Synthetic oligonucleotide

SEQ ID NO: 658968 - DNA, 55 bp, Artificial; identical to SEQ ID NO: 289064
  Synthetic oligonucleotide

SEQ ID NO: 658969 - DNA, 60 bp, Artificial; identical to SEQ ID NO: 291838
  Synthetic oligonucleotide

SEQ ID NO: 658970 - DNA, 50 bp, Artificial; identical to SEQ ID NO: 289062
  Synthetic oligonucleotide

SEQ ID NO: 658971 - DNA, 55 bp, Artificial; identical to SEQ ID NO: 289061
  Synthetic oligonucleotide

SEQ ID NO: 658972 - DNA, 55 bp, Artificial; identical to SEQ ID NO: 289059
  Synthetic oligonucleotide

SEQ ID NO: 658973 - DNA, 50 bp, Artificial; identical to SEQ ID NO: 295636
  Synthetic oligonucleotide

SEQ ID NO: 658974 - DNA, 55 bp, Artificial; identical to SEQ ID NO: 288708
  Synthetic oligonucleotide

SEQ ID NO: 658975 - DNA, 53 bp, Artificial; identical to SEQ ID NO: 288707
  Synthetic oligonucleotide

SEQ ID NO: 658976 - DNA, 55 bp, Artificial; identical to SEQ ID NO: 288706
  Synthetic oligonucleotide

SEQ ID NO: 658977 - DNA, 55 bp, Artificial; identical to SEQ ID NO: 288704
  Synthetic oligonucleotide

SEQ ID NO: 658978 - DNA, 55 bp, Artificial; identical to SEQ ID NO: 288702
  Synthetic oligonucleotide

SEQ ID NO: 658979 - DNA, 55 bp, Artificial; identical to SEQ ID NO: 288700
  Synthetic oligonucleotide

SEQ ID NO: 658980 - DNA, 55 bp, Artificial; identical to SEQ ID NO: 288698
  Synthetic oligonucleotide

SEQ ID NO: 658981 - DNA, 55 bp, Artificial; identical to SEQ ID NO: 288695
  Synthetic oligonucleotide

SEQ ID NO: 658982 - DNA, 55 bp, Artificial; identical to SEQ ID NO: 288692
  Synthetic oligonucleotide

SEQ ID NO: 658983 - DNA, 55 bp, Artificial; identical to SEQ ID NO: 288690
  Synthetic oligonucleotide

SEQ ID NO: 658984 - DNA, 55 bp, Artificial; identical to SEQ ID NO: 288689
  Synthetic oligonucleotide

SEQ ID NO: 658985 - DNA, 55 bp, Artificial; identical to SEQ ID NO: 288687
  Synthetic oligonucleotide

SEQ ID NO: 658986 - DNA, 54 bp, Artificial; identical to SEQ ID NO: 293198
  Synthetic oligonucleotide

SEQ ID NO: 658987 - DNA, 50 bp, Artificial; identical to SEQ ID NO: 291238
  Synthetic oligonucleotide

SEQ ID NO: 658988 - DNA, 53 bp, Artificial; identical to SEQ ID NO: 293747
  Synthetic oligonucleotide

SEQ ID NO: 658989 - DNA, 49 bp, Artificial; identical to SEQ ID NO: 288684
  Synthetic oligonucleotide

SEQ ID NO: 658990 - DNA, 50 bp, Artificial; identical to SEQ ID NO: 296267
  Synthetic oligonucleotide

SEQ ID NO: 658991 - DNA, 52 bp, Artificial; identical to SEQ ID NO: 294279
  Synthetic oligonucleotide

SEQ ID NO: 658992 - DNA, 57 bp, Artificial; identical to SEQ ID NO: 291260
  Synthetic oligonucleotide

SEQ ID NO: 658993 - DNA, 54 bp, Artificial; identical to SEQ ID NO: 293161
  Synthetic oligonucleotide

SEQ ID NO: 658994 - DNA, 55 bp, Artificial; identical to SEQ ID NO: 288679
  Synthetic oligonucleotide

SEQ ID NO: 658995 - DNA, 55 bp, Artificial; identical to SEQ ID NO: 288678
  Synthetic oligonucleotide

SEQ ID NO: 658996 - DNA, 50 bp, Artificial; identical to SEQ ID NO: 296253
  Synthetic oligonucleotide

SEQ ID NO: 658997 - DNA, 51 bp, Artificial; identical to SEQ ID NO: 291305
  Synthetic oligonucleotide

SEQ ID NO: 658998 - DNA, 55 bp, Artificial; identical to SEQ ID NO: 296704
  Synthetic oligonucleotide

SEQ ID NO: 658999 - DNA, 58 bp, Artificial; identical to SEQ ID NO: 295948
  Synthetic oligonucleotide

SEQ ID NO: 659000 - DNA, 55 bp, Artificial; identical to SEQ ID NO: 288743
  Synthetic oligonucleotide

SEQ ID NO: 659001 - DNA, 55 bp, Artificial; identical to SEQ ID NO: 288730
  Synthetic oligonucleotide

SEQ ID NO: 659002 - DNA, 54 bp, Artificial; identical to SEQ ID NO: 288729
  Synthetic oligonucleotide

SEQ ID NO: 659003 - DNA, 55 bp, Artificial; identical to SEQ ID NO: 288728
  Synthetic oligonucleotide

SEQ ID NO: 659004 - DNA, 52 bp, Artificial; identical to SEQ ID NO: 294292
  Synthetic oligonucleotide

SEQ ID NO: 659005 - DNA, 57 bp, Artificial; identical to SEQ ID NO: 296482
  Synthetic oligonucleotide

SEQ ID NO: 659006 - DNA, 55 bp, Artificial; identical to SEQ ID NO: 288721
  Synthetic oligonucleotide

SEQ ID NO: 659007 - DNA, 55 bp, Artificial; identical to SEQ ID NO: 288720
  Synthetic oligonucleotide

SEQ ID NO: 659008 - DNA, 55 bp, Artificial; identical to SEQ ID NO: 288718
  Synthetic oligonucleotide

SEQ ID NO: 659009 - DNA, 55 bp, Artificial; identical to SEQ ID NO: 288717
  Synthetic oligonucleotide

SEQ ID NO: 659010 - DNA, 52 bp, Artificial; identical to SEQ ID NO: 294310
  Synthetic oligonucleotide

SEQ ID NO: 659011 - DNA, 55 bp, Artificial; identical to SEQ ID NO: 288715
  Synthetic oligonucleotide

SEQ ID NO: 659012 - DNA, 54 bp, Artificial; identical to SEQ ID NO: 293223
  Synthetic oligonucleotide

SEQ ID NO: 659013 - DNA, 53 bp, Artificial; identical to SEQ ID NO: 293730
  Synthetic oligonucleotide

SEQ ID NO: 659014 - DNA, 50 bp, Artificial; identical to SEQ ID NO: 296374
  Synthetic oligonucleotide

SEQ ID NO: 659015 - DNA, 55 bp, Artificial; identical to SEQ ID NO: 288637
  Synthetic oligonucleotide

SEQ ID NO: 659016 - DNA, 52 bp, Artificial; identical to SEQ ID NO: 294288
  Synthetic oligonucleotide

SEQ ID NO: 659017 - DNA, 55 bp, Artificial; identical to SEQ ID NO: 288634
  Synthetic oligonucleotide

SEQ ID NO: 659018 - DNA, 55 bp, Artificial; identical to SEQ ID NO: 288633
  Synthetic oligonucleotide

SEQ ID NO: 659019 - DNA, 54 bp, Artificial; identical to SEQ ID NO: 293232
  Synthetic oligonucleotide

SEQ ID NO: 659020 - DNA, 52 bp, Artificial; identical to SEQ ID NO: 294332
  Synthetic oligonucleotide

SEQ ID NO: 659021 - DNA, 58 bp, Artificial; identical to SEQ ID NO: 295194
  Synthetic oligonucleotide

SEQ ID NO: 659022 - DNA, 55 bp, Artificial; identical to SEQ ID NO: 288631
  Synthetic oligonucleotide

SEQ ID NO: 659023 - DNA, 58 bp, Artificial; identical to SEQ ID NO: 289449
  Synthetic oligonucleotide

SEQ ID NO: 659024 - DNA, 57 bp, Artificial; identical to SEQ ID NO: 289517
  Synthetic oligonucleotide

SEQ ID NO: 659025 - DNA, 51 bp, Artificial; identical to SEQ ID NO: 294730
  Synthetic oligonucleotide

SEQ ID NO: 659026 - DNA, 55 bp, Artificial; identical to SEQ ID NO: 288626
  Synthetic oligonucleotide

SEQ ID NO: 659027 - DNA, 60 bp, Artificial; identical to SEQ ID NO: 289561
  Synthetic oligonucleotide

SEQ ID NO: 659028 - DNA, 60 bp, Artificial; identical to SEQ ID NO: 289750
  Synthetic oligonucleotide

SEQ ID NO: 659029 - DNA, 55 bp, Artificial; identical to SEQ ID NO: 288624
  Synthetic oligonucleotide

SEQ ID NO: 659030 - DNA, 55 bp, Artificial; identical to SEQ ID NO: 288623
  Synthetic oligonucleotide

SEQ ID NO: 659031 - DNA, 55 bp, Artificial; identical to SEQ ID NO: 288622
  Synthetic oligonucleotide

SEQ ID NO: 659032 - DNA, 55 bp, Artificial; identical to SEQ ID NO: 288620
  Synthetic oligonucleotide

SEQ ID NO: 659033 - DNA, 50 bp, Artificial; identical to SEQ ID NO: 296300
  Synthetic oligonucleotide

SEQ ID NO: 659034 - DNA, 55 bp, Artificial; identical to SEQ ID NO: 288615
  Synthetic oligonucleotide

SEQ ID NO: 659035 - DNA, 55 bp, Artificial; identical to SEQ ID NO: 288614
  Synthetic oligonucleotide

SEQ ID NO: 659036 - DNA, 55 bp, Artificial; identical to SEQ ID NO: 288613
  Synthetic oligonucleotide

SEQ ID NO: 659037 - DNA, 55 bp, Artificial; identical to SEQ ID NO: 288612
  Synthetic oligonucleotide

SEQ ID NO: 659038 - DNA, 51 bp, Artificial; identical to SEQ ID NO: 294707
  Synthetic oligonucleotide

SEQ ID NO: 659039 - DNA, 51 bp, Artificial; identical to SEQ ID NO: 289661
  Synthetic oligonucleotide

SEQ ID NO: 659040 - DNA, 55 bp, Artificial; identical to SEQ ID NO: 288607
  Synthetic oligonucleotide

SEQ ID NO: 659041 - DNA, 52 bp, Artificial; identical to SEQ ID NO: 289628
  Synthetic oligonucleotide

SEQ ID NO: 659042 - DNA, 53 bp, Artificial; identical to SEQ ID NO: 294294
  Synthetic oligonucleotide

SEQ ID NO: 659043 - DNA, 55 bp, Artificial; identical to SEQ ID NO: 288674
  Synthetic oligonucleotide

SEQ ID NO: 659044 - DNA, 55 bp, Artificial; identical to SEQ ID NO: 288673
  Synthetic oligonucleotide

SEQ ID NO: 659045 - DNA, 55 bp, Artificial; identical to SEQ ID NO: 288671
  Synthetic oligonucleotide

SEQ ID NO: 659046 - DNA, 55 bp, Artificial; identical to SEQ ID NO: 288669
  Synthetic oligonucleotide

SEQ ID NO: 659047 - DNA, 54 bp, Artificial; identical to SEQ ID NO: 293217
  Synthetic oligonucleotide

SEQ ID NO: 659048 - DNA, 55 bp, Artificial; identical to SEQ ID NO: 296571
  Synthetic oligonucleotide

SEQ ID NO: 659049 - DNA, 54 bp, Artificial; identical to SEQ ID NO: 286771
  Synthetic oligonucleotide

SEQ ID NO: 659050 - DNA, 55 bp, Artificial; identical to SEQ ID NO: 288667
  Synthetic oligonucleotide

SEQ ID NO: 659051 - DNA, 57 bp, Artificial; identical to SEQ ID NO: 289072
  Synthetic oligonucleotide

SEQ ID NO: 659052 - DNA, 57 bp, Artificial; identical to SEQ ID NO: 289105
  Synthetic oligonucleotide

SEQ ID NO: 659053 - DNA, 54 bp, Artificial; identical to SEQ ID NO: 293220
  Synthetic oligonucleotide

SEQ ID NO: 659054 - DNA, 55 bp, Artificial; identical to SEQ ID NO: 288658
  Synthetic oligonucleotide

SEQ ID NO: 659055 - DNA, 54 bp, Artificial; identical to SEQ ID NO: 289160
  Synthetic oligonucleotide

SEQ ID NO: 659056 - DNA, 60 bp, Artificial; identical to SEQ ID NO: 289183
  Synthetic oligonucleotide

SEQ ID NO: 659057 - DNA, 53 bp, Artificial; identical to SEQ ID NO: 293700
  Synthetic oligonucleotide

SEQ ID NO: 659058 - DNA, 53 bp, Artificial; identical to SEQ ID NO: 293701
  Synthetic oligonucleotide

SEQ ID NO: 659059 - DNA, 55 bp, Artificial; identical to SEQ ID NO: 288655
  Synthetic oligonucleotide

SEQ ID NO: 659060 - DNA, 55 bp, Artificial; identical to SEQ ID NO: 288653
  Synthetic oligonucleotide

SEQ ID NO: 659061 - DNA, 55 bp, Artificial; identical to SEQ ID NO: 288652
  Synthetic oligonucleotide

SEQ ID NO: 659062 - DNA, 55 bp, Artificial; identical to SEQ ID NO: 288651
  Synthetic oligonucleotide

SEQ ID NO: 659063 - DNA, 55 bp, Artificial; identical to SEQ ID NO: 288648
  Synthetic oligonucleotide

SEQ ID NO: 659064 - DNA, 55 bp, Artificial; identical to SEQ ID NO: 288647
  Synthetic oligonucleotide

SEQ ID NO: 659065 - DNA, 55 bp, Artificial; identical to SEQ ID NO: 288646
  Synthetic oligonucleotide

SEQ ID NO: 659066 - DNA, 55 bp, Artificial; identical to SEQ ID NO: 288643
  Synthetic oligonucleotide

SEQ ID NO: 659067 - DNA, 55 bp, Artificial; identical to SEQ ID NO: 288642
  Synthetic oligonucleotide

SEQ ID NO: 659068 - DNA, 58 bp, Artificial; identical to SEQ ID NO: 295704
  Synthetic oligonucleotide

SEQ ID NO: 659069 - DNA, 55 bp, Artificial; identical to SEQ ID NO: 288848
  Synthetic oligonucleotide

SEQ ID NO: 659070 - DNA, 55 bp, Artificial; identical to SEQ ID NO: 288844
  Synthetic oligonucleotide

SEQ ID NO: 659071 - DNA, 55 bp, Artificial; identical to SEQ ID NO: 288843
  Synthetic oligonucleotide

SEQ ID NO: 659072 - DNA, 55 bp, Artificial; identical to SEQ ID NO: 288840
  Synthetic oligonucleotide

SEQ ID NO: 659073 - DNA, 55 bp, Artificial; identical to SEQ ID NO: 288839
  Synthetic oligonucleotide

SEQ ID NO: 659074 - DNA, 55 bp, Artificial; identical to SEQ ID NO: 288836
  Synthetic oligonucleotide

SEQ ID NO: 659075 - DNA, 53 bp, Artificial; identical to SEQ ID NO: 288835
  Synthetic oligonucleotide

SEQ ID NO: 659076 - DNA, 55 bp, Artificial; identical to SEQ ID NO: 288830
  Synthetic oligonucleotide

SEQ ID NO: 659077 - DNA, 55 bp, Artificial; identical to SEQ ID NO: 288829
  Synthetic oligonucleotide

SEQ ID NO: 659078 - DNA, 55 bp, Artificial; identical to SEQ ID NO: 288826
  Synthetic oligonucleotide

SEQ ID NO: 659079 - DNA, 55 bp, Artificial; identical to SEQ ID NO: 288824
  Synthetic oligonucleotide

SEQ ID NO: 659080 - DNA, 55 bp, Artificial; identical to SEQ ID NO: 288823
  Synthetic oligonucleotide

SEQ ID NO: 659081 - DNA, 55 bp, Artificial; identical to SEQ ID NO: 288822
  Synthetic oligonucleotide

SEQ ID NO: 659082 - DNA, 55 bp, Artificial; identical to SEQ ID NO: 288819
  Synthetic oligonucleotide

SEQ ID NO: 659083 - DNA, 55 bp, Artificial; identical to SEQ ID NO: 288818
  Synthetic oligonucleotide

SEQ ID NO: 659084 - DNA, 55 bp, Artificial; identical to SEQ ID NO: 288817
  Synthetic oligonucleotide

SEQ ID NO: 659085 - DNA, 55 bp, Artificial; identical to SEQ ID NO: 288882
  Synthetic oligonucleotide

SEQ ID NO: 659086 - DNA, 55 bp, Artificial; identical to SEQ ID NO: 288879
  Synthetic oligonucleotide

SEQ ID NO: 659087 - DNA, 55 bp, Artificial; identical to SEQ ID NO: 288878
  Synthetic oligonucleotide

SEQ ID NO: 659088 - DNA, 55 bp, Artificial; identical to SEQ ID NO: 288877
  Synthetic oligonucleotide

SEQ ID NO: 659089 - DNA, 55 bp, Artificial; identical to SEQ ID NO: 288874
  Synthetic oligonucleotide

SEQ ID NO: 659090 - DNA, 57 bp, Artificial; identical to SEQ ID NO: 296382
  Synthetic oligonucleotide

SEQ ID NO: 659091 - DNA, 55 bp, Artificial; identical to SEQ ID NO: 288873
  Synthetic oligonucleotide

SEQ ID NO: 659092 - DNA, 55 bp, Artificial; identical to SEQ ID NO: 288871
  Synthetic oligonucleotide

SEQ ID NO: 659093 - DNA, 55 bp, Artificial; identical to SEQ ID NO: 288864
  Synthetic oligonucleotide

SEQ ID NO: 659094 - DNA, 52 bp, Artificial; identical to SEQ ID NO: 294276
  Synthetic oligonucleotide

SEQ ID NO: 659095 - DNA, 55 bp, Artificial; identical to SEQ ID NO: 288860
  Synthetic oligonucleotide

SEQ ID NO: 659096 - DNA, 55 bp, Artificial; identical to SEQ ID NO: 288856
  Synthetic oligonucleotide

SEQ ID NO: 659097 - DNA, 55 bp, Artificial; identical to SEQ ID NO: 288855
  Synthetic oligonucleotide

SEQ ID NO: 659098 - DNA, 55 bp, Artificial; identical to SEQ ID NO: 288854
  Synthetic oligonucleotide

SEQ ID NO: 659099 - DNA, 55 bp, Artificial; identical to SEQ ID NO: 288853
  Synthetic oligonucleotide

SEQ ID NO: 659100 - DNA, 58 bp, Artificial; identical to SEQ ID NO: 290405
  Synthetic oligonucleotide

SEQ ID NO: 659101 - DNA, 55 bp, Artificial; identical to SEQ ID NO: 288779
  Synthetic oligonucleotide

SEQ ID NO: 659102 - DNA, 51 bp, Artificial; identical to SEQ ID NO: 294748
  Synthetic oligonucleotide

SEQ ID NO: 659103 - DNA, 55 bp, Artificial; identical to SEQ ID NO: 288777
  Synthetic oligonucleotide

SEQ ID NO: 659104 - DNA, 59 bp, Artificial; identical to SEQ ID NO: 294749
  Synthetic oligonucleotide

SEQ ID NO: 659105 - DNA, 55 bp, Artificial; identical to SEQ ID NO: 288775
  Synthetic oligonucleotide

SEQ ID NO: 659106 - DNA, 60 bp, Artificial; identical to SEQ ID NO: 290393
  Synthetic oligonucleotide

SEQ ID NO: 659107 - DNA, 55 bp, Artificial; identical to SEQ ID NO: 288774
  Synthetic oligonucleotide

SEQ ID NO: 659108 - DNA, 55 bp, Artificial; identical to SEQ ID NO: 288770
  Synthetic oligonucleotide

SEQ ID NO: 659109 - DNA, 55 bp, Artificial; identical to SEQ ID NO: 288769
  Synthetic oligonucleotide

SEQ ID NO: 659110 - DNA, 51 bp, Artificial; identical to SEQ ID NO: 294654
  Synthetic oligonucleotide

SEQ ID NO: 659111 - DNA, 55 bp, Artificial; identical to SEQ ID NO: 288767
  Synthetic oligonucleotide

SEQ ID NO: 659112 - DNA, 55 bp, Artificial; identical to SEQ ID NO: 288766
  Synthetic oligonucleotide

SEQ ID NO: 659113 - DNA, 55 bp, Artificial; identical to SEQ ID NO: 288763
  Synthetic oligonucleotide

SEQ ID NO: 659114 - DNA, 55 bp, Artificial; identical to SEQ ID NO: 288759
  Synthetic oligonucleotide

SEQ ID NO: 659115 - DNA, 55 bp, Artificial; identical to SEQ ID NO: 288758
  Synthetic oligonucleotide

SEQ ID NO: 659116 - DNA, 55 bp, Artificial; identical to SEQ ID NO: 288757
  Synthetic oligonucleotide

SEQ ID NO: 659117 - DNA, 55 bp, Artificial; identical to SEQ ID NO: 288753
  Synthetic oligonucleotide

SEQ ID NO: 659118 - DNA, 55 bp, Artificial; identical to SEQ ID NO: 288751
  Synthetic oligonucleotide

SEQ ID NO: 659119 - DNA, 55 bp, Artificial; identical to SEQ ID NO: 289861
  Synthetic oligonucleotide

SEQ ID NO: 659120 - DNA, 55 bp, Artificial; identical to SEQ ID NO: 288748
  Synthetic oligonucleotide

SEQ ID NO: 659121 - DNA, 58 bp, Artificial; identical to SEQ ID NO: 295316
  Synthetic oligonucleotide

SEQ ID NO: 659122 - DNA, 55 bp, Artificial; identical to SEQ ID NO: 288747
  Synthetic oligonucleotide

SEQ ID NO: 659123 - DNA, 55 bp, Artificial; identical to SEQ ID NO: 288746
  Synthetic oligonucleotide

SEQ ID NO: 659124 - DNA, 55 bp, Artificial; identical to SEQ ID NO: 288812
  Synthetic oligonucleotide

SEQ ID NO: 659125 - DNA, 55 bp, Artificial; identical to SEQ ID NO: 288808
  Synthetic oligonucleotide

SEQ ID NO: 659126 - DNA, 55 bp, Artificial; identical to SEQ ID NO: 288807
  Synthetic oligonucleotide

SEQ ID NO: 659127 - DNA, 55 bp, Artificial; identical to SEQ ID NO: 288806
  Synthetic oligonucleotide

SEQ ID NO: 659128 - DNA, 50 bp, Artificial; identical to SEQ ID NO: 295263
  Synthetic oligonucleotide

SEQ ID NO: 659129 - DNA, 55 bp, Artificial; identical to SEQ ID NO: 288803
  Synthetic oligonucleotide

SEQ ID NO: 659130 - DNA, 55 bp, Artificial; identical to SEQ ID NO: 288802
  Synthetic oligonucleotide

SEQ ID NO: 659131 - DNA, 51 bp, Artificial; identical to SEQ ID NO: 294548
  Synthetic oligonucleotide

SEQ ID NO: 659132 - DNA, 55 bp, Artificial; identical to SEQ ID NO: 288801
  Synthetic oligonucleotide

SEQ ID NO: 659133 - DNA, 55 bp, Artificial; identical to SEQ ID NO: 288800
  Synthetic oligonucleotide

SEQ ID NO: 659134 - DNA, 60 bp, Artificial; identical to SEQ ID NO: 290005
  Synthetic oligonucleotide

SEQ ID NO: 659135 - DNA, 50 bp, Artificial; identical to SEQ ID NO: 295280
  Synthetic oligonucleotide

SEQ ID NO: 659136 - DNA, 55 bp, Artificial; identical to SEQ ID NO: 288798
  Synthetic oligonucleotide

SEQ ID NO: 659137 - DNA, 51 bp, Artificial; identical to SEQ ID NO: 294496
  Synthetic oligonucleotide

SEQ ID NO: 659138 - DNA, 55 bp, Artificial; identical to SEQ ID NO: 288795
  Synthetic oligonucleotide

SEQ ID NO: 659139 - DNA, 55 bp, Artificial; identical to SEQ ID NO: 288793
  Synthetic oligonucleotide

SEQ ID NO: 659140 - DNA, 55 bp, Artificial; identical to SEQ ID NO: 288786
  Synthetic oligonucleotide

SEQ ID NO: 659141 - DNA, 55 bp, Artificial; identical to SEQ ID NO: 288785
  Synthetic oligonucleotide

SEQ ID NO: 659142 - DNA, 55 bp, Artificial; identical to SEQ ID NO: 288781
  Synthetic oligonucleotide

SEQ ID NO: 659143 - DNA, 55 bp, Artificial; identical to SEQ ID NO: 288780
  Synthetic oligonucleotide

SEQ ID NO: 659144 - DNA, 60 bp, Artificial; identical to SEQ ID NO: 290105
  Synthetic oligonucleotide

SEQ ID NO: 659145 - DNA, 55 bp, Artificial; identical to SEQ ID NO: 287518
  Synthetic oligonucleotide

SEQ ID NO: 659146 - DNA, 57 bp, Artificial; identical to SEQ ID NO: 296649
  Synthetic oligonucleotide

SEQ ID NO: 659147 - DNA, 55 bp, Artificial; identical to SEQ ID NO: 287510
  Synthetic oligonucleotide

SEQ ID NO: 659148 - DNA, 55 bp, Artificial; identical to SEQ ID NO: 287508
  Synthetic oligonucleotide

SEQ ID NO: 659149 - DNA, 55 bp, Artificial; identical to SEQ ID NO: 287506
  Synthetic oligonucleotide

SEQ ID NO: 659150 - DNA, 55 bp, Artificial; identical to SEQ ID NO: 287503
  Synthetic oligonucleotide

SEQ ID NO: 659151 - DNA, 52 bp, Artificial; identical to SEQ ID NO: 294352
  Synthetic oligonucleotide

SEQ ID NO: 659152 - DNA, 55 bp, Artificial; identical to SEQ ID NO: 287499
  Synthetic oligonucleotide

SEQ ID NO: 659153 - DNA, 56 bp, Artificial; identical to SEQ ID NO: 289972
  Synthetic oligonucleotide

SEQ ID NO: 659154 - DNA, 54 bp, Artificial; identical to SEQ ID NO: 287540
  Synthetic oligonucleotide

SEQ ID NO: 659155 - DNA, 53 bp, Artificial; identical to SEQ ID NO: 293681
  Synthetic oligonucleotide

SEQ ID NO: 659156 - DNA, 55 bp, Artificial; identical to SEQ ID NO: 287533
  Synthetic oligonucleotide

SEQ ID NO: 659157 - DNA, 54 bp, Artificial; identical to SEQ ID NO: 293047
  Synthetic oligonucleotide

SEQ ID NO: 659158 - DNA, 52 bp, Artificial; identical to SEQ ID NO: 289827
  Synthetic oligonucleotide

SEQ ID NO: 659159 - DNA, 59 bp, Artificial; identical to SEQ ID NO: 289805
  Synthetic oligonucleotide

SEQ ID NO: 659160 - DNA, 51 bp, Artificial; identical to SEQ ID NO: 294773
  Synthetic oligonucleotide

SEQ ID NO: 659161 - DNA, 51 bp, Artificial; identical to SEQ ID NO: 294779
  Synthetic oligonucleotide

SEQ ID NO: 659162 - DNA, 53 bp, Artificial; identical to SEQ ID NO: 289783
  Synthetic oligonucleotide

SEQ ID NO: 659163 - DNA, 53 bp, Artificial; identical to SEQ ID NO: 293685
  Synthetic oligonucleotide

SEQ ID NO: 659164 - DNA, 55 bp, Artificial; identical to SEQ ID NO: 287467
  Synthetic oligonucleotide

SEQ ID NO: 659165 - DNA, 55 bp, Artificial; identical to SEQ ID NO: 287464
  Synthetic oligonucleotide

SEQ ID NO: 659166 - DNA, 55 bp, Artificial; identical to SEQ ID NO: 287463
  Synthetic oligonucleotide

SEQ ID NO: 659167 - DNA, 55 bp, Artificial; identical to SEQ ID NO: 287459
  Synthetic oligonucleotide

SEQ ID NO: 659168 - DNA, 55 bp, Artificial; identical to SEQ ID NO: 287456
  Synthetic oligonucleotide

SEQ ID NO: 659169 - DNA, 55 bp, Artificial; identical to SEQ ID NO: 287497
  Synthetic oligonucleotide

SEQ ID NO: 659170 - DNA, 55 bp, Artificial; identical to SEQ ID NO: 287496
  Synthetic oligonucleotide

SEQ ID NO: 659171 - DNA, 52 bp, Artificial; identical to SEQ ID NO: 294306
  Synthetic oligonucleotide

SEQ ID NO: 659172 - DNA, 55 bp, Artificial; identical to SEQ ID NO: 287492
  Synthetic oligonucleotide

SEQ ID NO: 659173 - DNA, 55 bp, Artificial; identical to SEQ ID NO: 287491
  Synthetic oligonucleotide

SEQ ID NO: 659174 - DNA, 52 bp, Artificial; identical to SEQ ID NO: 294296
  Synthetic oligonucleotide

SEQ ID NO: 659175 - DNA, 51 bp, Artificial; identical to SEQ ID NO: 294839
  Synthetic oligonucleotide

SEQ ID NO: 659176 - DNA, 55 bp, Artificial; identical to SEQ ID NO: 287485
  Synthetic oligonucleotide

SEQ ID NO: 659177 - DNA, 55 bp, Artificial; identical to SEQ ID NO: 287482
  Synthetic oligonucleotide

SEQ ID NO: 659178 - DNA, 52 bp, Artificial; identical to SEQ ID NO: 294251
  Synthetic oligonucleotide

SEQ ID NO: 659179 - DNA, 51 bp, Artificial; identical to SEQ ID NO: 294920
  Synthetic oligonucleotide

SEQ ID NO: 659180 - DNA, 55 bp, Artificial; identical to SEQ ID NO: 287480
  Synthetic oligonucleotide

SEQ ID NO: 659181 - DNA, 54 bp, Artificial; identical to SEQ ID NO: 293104
  Synthetic oligonucleotide

SEQ ID NO: 659182 - DNA, 55 bp, Artificial; identical to SEQ ID NO: 290416
  Synthetic oligonucleotide

SEQ ID NO: 659183 - DNA, 56 bp, Artificial; identical to SEQ ID NO: 296216
  Synthetic oligonucleotide

SEQ ID NO: 659184 - DNA, 50 bp, Artificial; identical to SEQ ID NO: 295067
  Synthetic oligonucleotide

SEQ ID NO: 659185 - DNA, 59 bp, Artificial; identical to SEQ ID NO: 290427
  Synthetic oligonucleotide

SEQ ID NO: 659186 - DNA, 55 bp, Artificial; identical to SEQ ID NO: 287610
  Synthetic oligonucleotide

SEQ ID NO: 659187 - DNA, 55 bp, Artificial; identical to SEQ ID NO: 287608
  Synthetic oligonucleotide

SEQ ID NO: 659188 - DNA, 53 bp, Artificial; identical to SEQ ID NO: 293139
  Synthetic oligonucleotide

SEQ ID NO: 659189 - DNA, 55 bp, Artificial; identical to SEQ ID NO: 287607
  Synthetic oligonucleotide

SEQ ID NO: 659190 - DNA, 55 bp, Artificial; identical to SEQ ID NO: 287604
  Synthetic oligonucleotide

SEQ ID NO: 659191 - DNA, 55 bp, Artificial; identical to SEQ ID NO: 287603
  Synthetic oligonucleotide

SEQ ID NO: 659192 - DNA, 54 bp, Artificial; identical to SEQ ID NO: 293135
  Synthetic oligonucleotide

SEQ ID NO: 659193 - DNA, 51 bp, Artificial; identical to SEQ ID NO: 294908
  Synthetic oligonucleotide

SEQ ID NO: 659194 - DNA, 53 bp, Artificial; identical to SEQ ID NO: 293667
  Synthetic oligonucleotide

SEQ ID NO: 659195 - DNA, 60 bp, Artificial; identical to SEQ ID NO: 290227
  Synthetic oligonucleotide

SEQ ID NO: 659196 - DNA, 55 bp, Artificial; identical to SEQ ID NO: 287598
  Synthetic oligonucleotide

SEQ ID NO: 659197 - DNA, 55 bp, Artificial; identical to SEQ ID NO: 287597
  Synthetic oligonucleotide

SEQ ID NO: 659198 - DNA, 55 bp, Artificial; identical to SEQ ID NO: 287596
  Synthetic oligonucleotide

SEQ ID NO: 659199 - DNA, 49 bp, Artificial; identical to SEQ ID NO: 287636
  Synthetic oligonucleotide

SEQ ID NO: 659200 - DNA, 55 bp, Artificial; identical to SEQ ID NO: 287634
  Synthetic oligonucleotide

SEQ ID NO: 659201 - DNA, 55 bp, Artificial; identical to SEQ ID NO: 287632
  Synthetic oligonucleotide

SEQ ID NO: 659202 - DNA, 55 bp, Artificial; identical to SEQ ID NO: 287630
  Synthetic oligonucleotide

SEQ ID NO: 659203 - DNA, 55 bp, Artificial; identical to SEQ ID NO: 287629
  Synthetic oligonucleotide

SEQ ID NO: 659204 - DNA, 55 bp, Artificial; identical to SEQ ID NO: 287626
  Synthetic oligonucleotide

SEQ ID NO: 659205 - DNA, 54 bp, Artificial; identical to SEQ ID NO: 293055
  Synthetic oligonucleotide

SEQ ID NO: 659206 - DNA, 55 bp, Artificial; identical to SEQ ID NO: 287624
  Synthetic oligonucleotide

SEQ ID NO: 659207 - DNA, 55 bp, Artificial; identical to SEQ ID NO: 287622
  Synthetic oligonucleotide

SEQ ID NO: 659208 - DNA, 55 bp, Artificial; identical to SEQ ID NO: 287621
  Synthetic oligonucleotide

SEQ ID NO: 659209 - DNA, 56 bp, Artificial; identical to SEQ ID NO: 297159
  Synthetic oligonucleotide

SEQ ID NO: 659210 - DNA, 52 bp, Artificial; identical to SEQ ID NO: 294370
  Synthetic oligonucleotide

SEQ ID NO: 659211 - DNA, 55 bp, Artificial; identical to SEQ ID NO: 287617
  Synthetic oligonucleotide

SEQ ID NO: 659212 - DNA, 55 bp, Artificial; identical to SEQ ID NO: 287612
  Synthetic oligonucleotide

SEQ ID NO: 659213 - DNA, 56 bp, Artificial; identical to SEQ ID NO: 297071
  Synthetic oligonucleotide

SEQ ID NO: 659214 - DNA, 56 bp, Artificial; identical to SEQ ID NO: 297126
  Synthetic oligonucleotide

SEQ ID NO: 659215 - DNA, 54 bp, Artificial; identical to SEQ ID NO: 289360
  Synthetic oligonucleotide

SEQ ID NO: 659216 - DNA, 55 bp, Artificial; identical to SEQ ID NO: 287558
  Synthetic oligonucleotide

SEQ ID NO: 659217 - DNA, 52 bp, Artificial; identical to SEQ ID NO: 294285
  Synthetic oligonucleotide

SEQ ID NO: 659218 - DNA, 55 bp, Artificial; identical to SEQ ID NO: 287555
  Synthetic oligonucleotide

SEQ ID NO: 659219 - DNA, 50 bp, Artificial; identical to SEQ ID NO: 286745
  Synthetic oligonucleotide

SEQ ID NO: 659220 - DNA, 60 bp, Artificial; identical to SEQ ID NO: 289316
  Synthetic oligonucleotide

SEQ ID NO: 659221 - DNA, 58 bp, Artificial; identical to SEQ ID NO: 289260
  Synthetic oligonucleotide

SEQ ID NO: 659222 - DNA, 55 bp, Artificial; identical to SEQ ID NO: 287582
  Synthetic oligonucleotide

SEQ ID NO: 659223 - DNA, 50 bp, Artificial; identical to SEQ ID NO: 286777
  Synthetic oligonucleotide

SEQ ID NO: 659224 - DNA, 59 bp, Artificial; identical to SEQ ID NO: 294704
  Synthetic oligonucleotide

SEQ ID NO: 659225 - DNA, 54 bp, Artificial; identical to SEQ ID NO: 294671
  Synthetic oligonucleotide

SEQ ID NO: 659226 - DNA, 55 bp, Artificial; identical to SEQ ID NO: 287574
  Synthetic oligonucleotide

SEQ ID NO: 659227 - DNA, 60 bp, Artificial; identical to SEQ ID NO: 289116
  Synthetic oligonucleotide

SEQ ID NO: 659228 - DNA, 55 bp, Artificial; identical to SEQ ID NO: 287568
  Synthetic oligonucleotide

SEQ ID NO: 659229 - DNA, 53 bp, Artificial; identical to SEQ ID NO: 293894
  Synthetic oligonucleotide

SEQ ID NO: 659230 - DNA, 56 bp, Artificial; identical to SEQ ID NO: 289038
  Synthetic oligonucleotide

SEQ ID NO: 659231 - DNA, 53 bp, Artificial; identical to SEQ ID NO: 293891
  Synthetic oligonucleotide

SEQ ID NO: 659232 - DNA, 55 bp, Artificial; identical to SEQ ID NO: 287271
  Synthetic oligonucleotide

SEQ ID NO: 659233 - DNA, 54 bp, Artificial; identical to SEQ ID NO: 293110
  Synthetic oligonucleotide

SEQ ID NO: 659234 - DNA, 54 bp, Artificial; identical to SEQ ID NO: 293111
  Synthetic oligonucleotide

SEQ ID NO: 659235 - DNA, 55 bp, Artificial; identical to SEQ ID NO: 287237
  Synthetic oligonucleotide

SEQ ID NO: 659236 - DNA, 55 bp, Artificial; identical to SEQ ID NO: 287337
  Synthetic oligonucleotide

SEQ ID NO: 659237 - DNA, 55 bp, Artificial; identical to SEQ ID NO: 287248
  Synthetic oligonucleotide

SEQ ID NO: 659238 - DNA, 55 bp, Artificial; identical to SEQ ID NO: 287425
  Synthetic oligonucleotide

SEQ ID NO: 659239 - DNA, 55 bp, Artificial; identical to SEQ ID NO: 287424
  Synthetic oligonucleotide

SEQ ID NO: 659240 - DNA, 55 bp, Artificial; identical to SEQ ID NO: 287423
  Synthetic oligonucleotide

SEQ ID NO: 659241 - DNA, 51 bp, Artificial; identical to SEQ ID NO: 294460
  Synthetic oligonucleotide

SEQ ID NO: 659242 - DNA, 59 bp, Artificial; identical to SEQ ID NO: 289694
  Synthetic oligonucleotide

SEQ ID NO: 659243 - DNA, 55 bp, Artificial; identical to SEQ ID NO: 287419
  Synthetic oligonucleotide

SEQ ID NO: 659244 - DNA, 55 bp, Artificial; identical to SEQ ID NO: 287415
  Synthetic oligonucleotide

SEQ ID NO: 659245 - DNA, 55 bp, Artificial; identical to SEQ ID NO: 287437
  Synthetic oligonucleotide

SEQ ID NO: 659246 - DNA, 52 bp, Artificial; identical to SEQ ID NO: 294242
  Synthetic oligonucleotide

SEQ ID NO: 659247 - DNA, 55 bp, Artificial; identical to SEQ ID NO: 287435
  Synthetic oligonucleotide

SEQ ID NO: 659248 - DNA, 54 bp, Artificial; identical to SEQ ID NO: 293023
  Synthetic oligonucleotide

SEQ ID NO: 659249 - DNA, 53 bp, Artificial; identical to SEQ ID NO: 293784
  Synthetic oligonucleotide

SEQ ID NO: 659250 - DNA, 54 bp, Artificial; identical to SEQ ID NO: 293041
  Synthetic oligonucleotide

SEQ ID NO: 659251 - DNA, 56 bp, Artificial; identical to SEQ ID NO: 297237
  Synthetic oligonucleotide

SEQ ID NO: 659252 - DNA, 55 bp, Artificial; identical to SEQ ID NO: 287380
  Synthetic oligonucleotide

SEQ ID NO: 659253 - DNA, 55 bp, Artificial; identical to SEQ ID NO: 287378
  Synthetic oligonucleotide

SEQ ID NO: 659254 - DNA, 55 bp, Artificial; identical to SEQ ID NO: 287377
  Synthetic oligonucleotide

SEQ ID NO: 659255 - DNA, 55 bp, Artificial; identical to SEQ ID NO: 287413
  Synthetic oligonucleotide

SEQ ID NO: 659256 - DNA, 51 bp, Artificial; identical to SEQ ID NO: 295008
  Synthetic oligonucleotide

SEQ ID NO: 659257 - DNA, 49 bp, Artificial; identical to SEQ ID NO: 287411
  Synthetic oligonucleotide

SEQ ID NO: 659258 - DNA, 55 bp, Artificial; identical to SEQ ID NO: 287409
  Synthetic oligonucleotide

SEQ ID NO: 659259 - DNA, 55 bp, Artificial; identical to SEQ ID NO: 287408
  Synthetic oligonucleotide

SEQ ID NO: 659260 - DNA, 55 bp, Artificial; identical to SEQ ID NO: 287404
  Synthetic oligonucleotide

SEQ ID NO: 659261 - DNA, 55 bp, Artificial; identical to SEQ ID NO: 287402
  Synthetic oligonucleotide

SEQ ID NO: 659262 - DNA, 55 bp, Artificial; identical to SEQ ID NO: 287397
  Synthetic oligonucleotide

SEQ ID NO: 659263 - DNA, 55 bp, Artificial; identical to SEQ ID NO: 287919
  Synthetic oligonucleotide

SEQ ID NO: 659264 - DNA, 55 bp, Artificial; identical to SEQ ID NO: 287915
  Synthetic oligonucleotide

SEQ ID NO: 659265 - DNA, 52 bp, Artificial; identical to SEQ ID NO: 294374
  Synthetic oligonucleotide

SEQ ID NO: 659266 - DNA, 55 bp, Artificial; identical to SEQ ID NO: 287908
  Synthetic oligonucleotide

SEQ ID NO: 659267 - DNA, 55 bp, Artificial; identical to SEQ ID NO: 287906
  Synthetic oligonucleotide

SEQ ID NO: 659268 - DNA, 55 bp, Artificial; identical to SEQ ID NO: 287904
  Synthetic oligonucleotide

SEQ ID NO: 659269 - DNA, 55 bp, Artificial; identical to SEQ ID NO: 287898
  Synthetic oligonucleotide

SEQ ID NO: 659270 - DNA, 55 bp, Artificial; identical to SEQ ID NO: 287897
  Synthetic oligonucleotide

SEQ ID NO: 659271 - DNA, 55 bp, Artificial; identical to SEQ ID NO: 287895
  Synthetic oligonucleotide

SEQ ID NO: 659272 - DNA, 55 bp, Artificial; identical to SEQ ID NO: 287937
  Synthetic oligonucleotide

SEQ ID NO: 659273 - DNA, 55 bp, Artificial; identical to SEQ ID NO: 287931
  Synthetic oligonucleotide

SEQ ID NO: 659274 - DNA, 55 bp, Artificial; identical to SEQ ID NO: 287929
  Synthetic oligonucleotide

SEQ ID NO: 659275 - DNA, 55 bp, Artificial; identical to SEQ ID NO: 287926
  Synthetic oligonucleotide

SEQ ID NO: 659276 - DNA, 53 bp, Artificial; identical to SEQ ID NO: 293856
  Synthetic oligonucleotide

SEQ ID NO: 659277 - DNA, 52 bp, Artificial; identical to SEQ ID NO: 294353
  Synthetic oligonucleotide

SEQ ID NO: 659278 - DNA, 51 bp, Artificial; identical to SEQ ID NO: 294531
  Synthetic oligonucleotide

SEQ ID NO: 659279 - DNA, 54 bp, Artificial; identical to SEQ ID NO: 287865
  Synthetic oligonucleotide

SEQ ID NO: 659280 - DNA, 54 bp, Artificial; identical to SEQ ID NO: 293098
  Synthetic oligonucleotide

SEQ ID NO: 659281 - DNA, 55 bp, Artificial; identical to SEQ ID NO: 287860
  Synthetic oligonucleotide

SEQ ID NO: 659282 - DNA, 56 bp, Artificial; identical to SEQ ID NO: 287126
  Synthetic oligonucleotide

SEQ ID NO: 659283 - DNA, 55 bp, Artificial; identical to SEQ ID NO: 287858
  Synthetic oligonucleotide

SEQ ID NO: 659284 - DNA, 55 bp, Artificial; identical to SEQ ID NO: 287855
  Synthetic oligonucleotide

SEQ ID NO: 659285 - DNA, 57 bp, Artificial; identical to SEQ ID NO: 295216
  Synthetic oligonucleotide

SEQ ID NO: 659286 - DNA, 55 bp, Artificial; identical to SEQ ID NO: 287848
  Synthetic oligonucleotide

SEQ ID NO: 659287 - DNA, 55 bp, Artificial; identical to SEQ ID NO: 287845
  Synthetic oligonucleotide

SEQ ID NO: 659288 - DNA, 50 bp, Artificial; identical to SEQ ID NO: 286717
  Synthetic oligonucleotide

SEQ ID NO: 659289 - DNA, 55 bp, Artificial; identical to SEQ ID NO: 287891
  Synthetic oligonucleotide

SEQ ID NO: 659290 - DNA, 55 bp, Artificial; identical to SEQ ID NO: 287890
  Synthetic oligonucleotide

SEQ ID NO: 659291 - DNA, 55 bp, Artificial; identical to SEQ ID NO: 287887
  Synthetic oligonucleotide

SEQ ID NO: 659292 - DNA, 55 bp, Artificial; identical to SEQ ID NO: 287882
  Synthetic oligonucleotide

SEQ ID NO: 659293 - DNA, 55 bp, Artificial; identical to SEQ ID NO: 287876
  Synthetic oligonucleotide

SEQ ID NO: 659294 - DNA, 60 bp, Artificial; identical to SEQ ID NO: 290694
  Synthetic oligonucleotide

SEQ ID NO: 659295 - DNA, 55 bp, Artificial; identical to SEQ ID NO: 288009
  Synthetic oligonucleotide

SEQ ID NO: 659296 - DNA, 55 bp, Artificial; identical to SEQ ID NO: 288008
  Synthetic oligonucleotide

SEQ ID NO: 659297 - DNA, 54 bp, Artificial; identical to SEQ ID NO: 288007
  Synthetic oligonucleotide

SEQ ID NO: 659298 - DNA, 55 bp, Artificial; identical to SEQ ID NO: 288004
  Synthetic oligonucleotide

SEQ ID NO: 659299 - DNA, 50 bp, Artificial; identical to SEQ ID NO: 286650
  Synthetic oligonucleotide

SEQ ID NO: 659300 - DNA, 52 bp, Artificial; identical to SEQ ID NO: 294307
  Synthetic oligonucleotide

SEQ ID NO: 659301 - DNA, 55 bp, Artificial; identical to SEQ ID NO: 288039
  Synthetic oligonucleotide

SEQ ID NO: 659302 - DNA, 56 bp, Artificial; identical to SEQ ID NO: 290549
  Synthetic oligonucleotide

SEQ ID NO: 659303 - DNA, 53 bp, Artificial; identical to SEQ ID NO: 293814
  Synthetic oligonucleotide

SEQ ID NO: 659304 - DNA, 55 bp, Artificial; identical to SEQ ID NO: 288026
  Synthetic oligonucleotide

SEQ ID NO: 659305 - DNA, 55 bp, Artificial; identical to SEQ ID NO: 288023
  Synthetic oligonucleotide

SEQ ID NO: 659306 - DNA, 55 bp, Artificial; identical to SEQ ID NO: 287968
  Synthetic oligonucleotide

SEQ ID NO: 659307 - DNA, 56 bp, Artificial; identical to SEQ ID NO: 291049
  Synthetic oligonucleotide

SEQ ID NO: 659308 - DNA, 59 bp, Artificial; identical to SEQ ID NO: 291060
  Synthetic oligonucleotide

SEQ ID NO: 659309 - DNA, 53 bp, Artificial; identical to SEQ ID NO: 293906
  Synthetic oligonucleotide

SEQ ID NO: 659310 - DNA, 53 bp, Artificial; identical to SEQ ID NO: 293919
  Synthetic oligonucleotide

SEQ ID NO: 659311 - DNA, 56 bp, Artificial; identical to SEQ ID NO: 287148
  Synthetic oligonucleotide

SEQ ID NO: 659312 - DNA, 52 bp, Artificial; identical to SEQ ID NO: 294339
  Synthetic oligonucleotide

SEQ ID NO: 659313 - DNA, 55 bp, Artificial; identical to SEQ ID NO: 287953
  Synthetic oligonucleotide

SEQ ID NO: 659314 - DNA, 59 bp, Artificial; identical to SEQ ID NO: 291160
  Synthetic oligonucleotide

SEQ ID NO: 659315 - DNA, 55 bp, Artificial; identical to SEQ ID NO: 287951
  Synthetic oligonucleotide

SEQ ID NO: 659316 - DNA, 51 bp, Artificial; identical to SEQ ID NO: 294673
  Synthetic oligonucleotide

SEQ ID NO: 659317 - DNA, 54 bp, Artificial; identical to SEQ ID NO: 290861
  Synthetic oligonucleotide

SEQ ID NO: 659318 - DNA, 56 bp, Artificial; identical to SEQ ID NO: 296937
  Synthetic oligonucleotide

SEQ ID NO: 659319 - DNA, 51 bp, Artificial; identical to SEQ ID NO: 296626
  Synthetic oligonucleotide

SEQ ID NO: 659320 - DNA, 50 bp, Artificial; identical to SEQ ID NO: 287179
  Synthetic oligonucleotide

SEQ ID NO: 659321 - DNA, 54 bp, Artificial; identical to SEQ ID NO: 296182
  Synthetic oligonucleotide

SEQ ID NO: 659322 - DNA, 55 bp, Artificial; identical to SEQ ID NO: 287979
  Synthetic oligonucleotide

SEQ ID NO: 659323 - DNA, 58 bp, Artificial; identical to SEQ ID NO: 295615
  Synthetic oligonucleotide

SEQ ID NO: 659324 - DNA, 54 bp, Artificial; identical to SEQ ID NO: 293019
  Synthetic oligonucleotide

SEQ ID NO: 659325 - DNA, 50 bp, Artificial; identical to SEQ ID NO: 287164
  Synthetic oligonucleotide

SEQ ID NO: 659326 - DNA, 55 bp, Artificial; identical to SEQ ID NO: 287971
  Synthetic oligonucleotide

SEQ ID NO: 659327 - DNA, 54 bp, Artificial; identical to SEQ ID NO: 287710
  Synthetic oligonucleotide

SEQ ID NO: 659328 - DNA, 55 bp, Artificial; identical to SEQ ID NO: 287709
  Synthetic oligonucleotide

SEQ ID NO: 659329 - DNA, 55 bp, Artificial; identical to SEQ ID NO: 287708
  Synthetic oligonucleotide

SEQ ID NO: 659330 - DNA, 55 bp, Artificial; identical to SEQ ID NO: 287707
  Synthetic oligonucleotide

SEQ ID NO: 659331 - DNA, 54 bp, Artificial; identical to SEQ ID NO: 287700
  Synthetic oligonucleotide

SEQ ID NO: 659332 - DNA, 55 bp, Artificial; identical to SEQ ID NO: 287699
  Synthetic oligonucleotide

SEQ ID NO: 659333 - DNA, 54 bp, Artificial; identical to SEQ ID NO: 292978
  Synthetic oligonucleotide

SEQ ID NO: 659334 - DNA, 55 bp, Artificial; identical to SEQ ID NO: 287733
  Synthetic oligonucleotide

SEQ ID NO: 659335 - DNA, 55 bp, Artificial; identical to SEQ ID NO: 287724
  Synthetic oligonucleotide

SEQ ID NO: 659336 - DNA, 55 bp, Artificial; identical to SEQ ID NO: 287719
  Synthetic oligonucleotide

SEQ ID NO: 659337 - DNA, 55 bp, Artificial; identical to SEQ ID NO: 287717
  Synthetic oligonucleotide

SEQ ID NO: 659338 - DNA, 55 bp, Artificial; identical to SEQ ID NO: 287715
  Synthetic oligonucleotide

SEQ ID NO: 659339 - DNA, 54 bp, Artificial; identical to SEQ ID NO: 293152
  Synthetic oligonucleotide

SEQ ID NO: 659340 - DNA, 55 bp, Artificial; identical to SEQ ID NO: 287657
  Synthetic oligonucleotide

SEQ ID NO: 659341 - DNA, 55 bp, Artificial; identical to SEQ ID NO: 287655
  Synthetic oligonucleotide

SEQ ID NO: 659342 - DNA, 55 bp, Artificial; identical to SEQ ID NO: 287649
  Synthetic oligonucleotide

SEQ ID NO: 659343 - DNA, 55 bp, Artificial; identical to SEQ ID NO: 287159
  Synthetic oligonucleotide

SEQ ID NO: 659344 - DNA, 55 bp, Artificial; identical to SEQ ID NO: 287647
  Synthetic oligonucleotide

SEQ ID NO: 659345 - DNA, 55 bp, Artificial; identical to SEQ ID NO: 287646
  Synthetic oligonucleotide

SEQ ID NO: 659346 - DNA, 55 bp, Artificial; identical to SEQ ID NO: 287642
  Synthetic oligonucleotide

SEQ ID NO: 659347 - DNA, 55 bp, Artificial; identical to SEQ ID NO: 287641
  Synthetic oligonucleotide

SEQ ID NO: 659348 - DNA, 55 bp, Artificial; identical to SEQ ID NO: 287638
  Synthetic oligonucleotide

SEQ ID NO: 659349 - DNA, 54 bp, Artificial; identical to SEQ ID NO: 293085
  Synthetic oligonucleotide

SEQ ID NO: 659350 - DNA, 55 bp, Artificial; identical to SEQ ID NO: 287685
  Synthetic oligonucleotide

SEQ ID NO: 659351 - DNA, 55 bp, Artificial; identical to SEQ ID NO: 287684
  Synthetic oligonucleotide

SEQ ID NO: 659352 - DNA, 51 bp, Artificial; identical to SEQ ID NO: 294623
  Synthetic oligonucleotide

SEQ ID NO: 659353 - DNA, 55 bp, Artificial; identical to SEQ ID NO: 287680
  Synthetic oligonucleotide

SEQ ID NO: 659354 - DNA, 55 bp, Artificial; identical to SEQ ID NO: 287679
  Synthetic oligonucleotide

SEQ ID NO: 659355 - DNA, 55 bp, Artificial; identical to SEQ ID NO: 287678
  Synthetic oligonucleotide

SEQ ID NO: 659356 - DNA, 60 bp, Artificial; identical to SEQ ID NO: 289182
  Synthetic oligonucleotide

SEQ ID NO: 659357 - DNA, 59 bp, Artificial; identical to SEQ ID NO: 288405
  Synthetic oligonucleotide

SEQ ID NO: 659358 - DNA, 55 bp, Artificial; identical to SEQ ID NO: 287815
  Synthetic oligonucleotide

SEQ ID NO: 659359 - DNA, 52 bp, Artificial; identical to SEQ ID NO: 294387
  Synthetic oligonucleotide

SEQ ID NO: 659360 - DNA, 55 bp, Artificial; identical to SEQ ID NO: 287810
  Synthetic oligonucleotide

SEQ ID NO: 659361 - DNA, 60 bp, Artificial; identical to SEQ ID NO: 286603
  Synthetic oligonucleotide

SEQ ID NO: 659362 - DNA, 53 bp, Artificial; identical to SEQ ID NO: 295427
  Synthetic oligonucleotide

SEQ ID NO: 659363 - DNA, 55 bp, Artificial; identical to SEQ ID NO: 287842
  Synthetic oligonucleotide

SEQ ID NO: 659364 - DNA, 55 bp, Artificial; identical to SEQ ID NO: 287841
  Synthetic oligonucleotide

SEQ ID NO: 659365 - DNA, 54 bp, Artificial; identical to SEQ ID NO: 293006
  Synthetic oligonucleotide

SEQ ID NO: 659366 - DNA, 55 bp, Artificial; identical to SEQ ID NO: 287836
  Synthetic oligonucleotide

SEQ ID NO: 659367 - DNA, 55 bp, Artificial; identical to SEQ ID NO: 287835
  Synthetic oligonucleotide

SEQ ID NO: 659368 - DNA, 55 bp, Artificial; identical to SEQ ID NO: 287832
  Synthetic oligonucleotide

SEQ ID NO: 659369 - DNA, 55 bp, Artificial; identical to SEQ ID NO: 287829
  Synthetic oligonucleotide

SEQ ID NO: 659370 - DNA, 52 bp, Artificial; identical to SEQ ID NO: 294227
  Synthetic oligonucleotide

SEQ ID NO: 659371 - DNA, 50 bp, Artificial; identical to SEQ ID NO: 286959
  Synthetic oligonucleotide

SEQ ID NO: 659372 - DNA, 56 bp, Artificial; identical to SEQ ID NO: 293293
  Synthetic oligonucleotide

SEQ ID NO: 659373 - DNA, 55 bp, Artificial; identical to SEQ ID NO: 287820
  Synthetic oligonucleotide

SEQ ID NO: 659374 - DNA, 54 bp, Artificial; identical to SEQ ID NO: 293015
  Synthetic oligonucleotide

SEQ ID NO: 659375 - DNA, 55 bp, Artificial; identical to SEQ ID NO: 287818
  Synthetic oligonucleotide

SEQ ID NO: 659376 - DNA, 55 bp, Artificial; identical to SEQ ID NO: 287760
  Synthetic oligonucleotide

SEQ ID NO: 659377 - DNA, 55 bp, Artificial; identical to SEQ ID NO: 287759
  Synthetic oligonucleotide

SEQ ID NO: 659378 - DNA, 58 bp, Artificial; identical to SEQ ID NO: 295915
  Synthetic oligonucleotide

SEQ ID NO: 659379 - DNA, 52 bp, Artificial; identical to SEQ ID NO: 294365
  Synthetic oligonucleotide

SEQ ID NO: 659380 - DNA, 55 bp, Artificial; identical to SEQ ID NO: 287746
  Synthetic oligonucleotide

SEQ ID NO: 659381 - DNA, 55 bp, Artificial; identical to SEQ ID NO: 287741
  Synthetic oligonucleotide

SEQ ID NO: 659382 - DNA, 55 bp, Artificial; identical to SEQ ID NO: 287790
  Synthetic oligonucleotide

SEQ ID NO: 659383 - DNA, 55 bp, Artificial; identical to SEQ ID NO: 287787
  Synthetic oligonucleotide

SEQ ID NO: 659384 - DNA, 55 bp, Artificial; identical to SEQ ID NO: 287779
  Synthetic oligonucleotide

SEQ ID NO: 659385 - DNA, 57 bp, Artificial; identical to SEQ ID NO: 296638
  Synthetic oligonucleotide

SEQ ID NO: 659386 - DNA, 55 bp, Artificial; identical to SEQ ID NO: 287776
  Synthetic oligonucleotide

SEQ ID NO: 659387 - DNA, 55 bp, Artificial; identical to SEQ ID NO: 287775
  Synthetic oligonucleotide

SEQ ID NO: 659388 - DNA, 55 bp, Artificial; identical to SEQ ID NO: 287765
  Synthetic oligonucleotide

SEQ ID NO: 659389 - DNA, 55 bp, Artificial; identical to SEQ ID NO: 287768
  Synthetic oligonucleotide

SEQ ID NO: 659390 - DNA, 55 bp, Artificial; identical to SEQ ID NO: 287784
  Synthetic oligonucleotide

SEQ ID NO: 659391 - DNA, 55 bp, Artificial; identical to SEQ ID NO: 287748
  Synthetic oligonucleotide

SEQ ID NO: 659392 - DNA, 53 bp, Artificial; identical to SEQ ID NO: 293546
  Synthetic oligonucleotide

SEQ ID NO: 659393 - DNA, 55 bp, Artificial; identical to SEQ ID NO: 287762
  Synthetic oligonucleotide

SEQ ID NO: 659394 - DNA, 55 bp, Artificial; identical to SEQ ID NO: 287763
  Synthetic oligonucleotide

SEQ ID NO: 659395 - DNA, 55 bp, Artificial; identical to SEQ ID NO: 287819
  Synthetic oligonucleotide

SEQ ID NO: 659396 - DNA, 50 bp, Artificial; identical to SEQ ID NO: 296654
  Synthetic oligonucleotide

SEQ ID NO: 659397 - DNA, 55 bp, Artificial; identical to SEQ ID NO: 287798
  Synthetic oligonucleotide

SEQ ID NO: 659398 - DNA, 56 bp, Artificial; identical to SEQ ID NO: 295438
  Synthetic oligonucleotide

SEQ ID NO: 659399 - DNA, 55 bp, Artificial; identical to SEQ ID NO: 287813
  Synthetic oligonucleotide

SEQ ID NO: 659400 - DNA, 55 bp, Artificial; identical to SEQ ID NO: 287663
  Synthetic oligonucleotide

SEQ ID NO: 659401 - DNA, 58 bp, Artificial; identical to SEQ ID NO: 295527
  Synthetic oligonucleotide

SEQ ID NO: 659402 - DNA, 55 bp, Artificial; identical to SEQ ID NO: 287682
  Synthetic oligonucleotide

SEQ ID NO: 659403 - DNA, 59 bp, Artificial; identical to SEQ ID NO: 288838
  Synthetic oligonucleotide

SEQ ID NO: 659404 - DNA, 55 bp, Artificial; identical to SEQ ID NO: 287645
  Synthetic oligonucleotide

SEQ ID NO: 659405 - DNA, 55 bp, Artificial; identical to SEQ ID NO: 287658
  Synthetic oligonucleotide

SEQ ID NO: 659406 - DNA, 55 bp, Artificial; identical to SEQ ID NO: 287720
  Synthetic oligonucleotide

SEQ ID NO: 659407 - DNA, 55 bp, Artificial; identical to SEQ ID NO: 287722
  Synthetic oligonucleotide

SEQ ID NO: 659408 - DNA, 54 bp, Artificial; identical to SEQ ID NO: 287728
  Synthetic oligonucleotide

SEQ ID NO: 659409 - DNA, 55 bp, Artificial; identical to SEQ ID NO: 287735
  Synthetic oligonucleotide

SEQ ID NO: 659410 - DNA, 55 bp, Artificial; identical to SEQ ID NO: 287693
  Synthetic oligonucleotide

SEQ ID NO: 659411 - DNA, 51 bp, Artificial; identical to SEQ ID NO: 287973
  Synthetic oligonucleotide

SEQ ID NO: 659412 - DNA, 60 bp, Artificial; identical to SEQ ID NO: 287916
  Synthetic oligonucleotide

SEQ ID NO: 659413 - DNA, 55 bp, Artificial; identical to SEQ ID NO: 287993
  Synthetic oligonucleotide

SEQ ID NO: 659414 - DNA, 55 bp, Artificial; identical to SEQ ID NO: 287995
  Synthetic oligonucleotide

SEQ ID NO: 659415 - DNA, 55 bp, Artificial; identical to SEQ ID NO: 287948
  Synthetic oligonucleotide

SEQ ID NO: 659416 - DNA, 55 bp, Artificial; identical to SEQ ID NO: 287950
  Synthetic oligonucleotide

SEQ ID NO: 659417 - DNA, 55 bp, Artificial; identical to SEQ ID NO: 287954
  Synthetic oligonucleotide

SEQ ID NO: 659418 - DNA, 55 bp, Artificial; identical to SEQ ID NO: 287969
  Synthetic oligonucleotide

SEQ ID NO: 659419 - DNA, 55 bp, Artificial; identical to SEQ ID NO: 288046
  Synthetic oligonucleotide

SEQ ID NO: 659420 - DNA, 55 bp, Artificial; identical to SEQ ID NO: 288003
  Synthetic oligonucleotide

SEQ ID NO: 659421 - DNA, 55 bp, Artificial; identical to SEQ ID NO: 288018
  Synthetic oligonucleotide

SEQ ID NO: 659422 - DNA, 55 bp, Artificial; identical to SEQ ID NO: 288021
  Synthetic oligonucleotide

SEQ ID NO: 659423 - DNA, 55 bp, Artificial; identical to SEQ ID NO: 287868
  Synthetic oligonucleotide

SEQ ID NO: 659424 - DNA, 55 bp, Artificial; identical to SEQ ID NO: 287856
  Synthetic oligonucleotide

SEQ ID NO: 659425 - DNA, 55 bp, Artificial; identical to SEQ ID NO: 287866
  Synthetic oligonucleotide

SEQ ID NO: 659426 - DNA, 51 bp, Artificial; identical to SEQ ID NO: 294684
  Synthetic oligonucleotide

SEQ ID NO: 659427 - DNA, 55 bp, Artificial; identical to SEQ ID NO: 287943
  Synthetic oligonucleotide

SEQ ID NO: 659428 - DNA, 55 bp, Artificial; identical to SEQ ID NO: 287384
  Synthetic oligonucleotide

SEQ ID NO: 659429 - DNA, 55 bp, Artificial; identical to SEQ ID NO: 287443
  Synthetic oligonucleotide

SEQ ID NO: 659430 - DNA, 58 bp, Artificial; identical to SEQ ID NO: 288160
  Synthetic oligonucleotide

SEQ ID NO: 659431 - DNA, 55 bp, Artificial; identical to SEQ ID NO: 287445
  Synthetic oligonucleotide

SEQ ID NO: 659432 - DNA, 55 bp, Artificial; identical to SEQ ID NO: 287449
  Synthetic oligonucleotide

SEQ ID NO: 659433 - DNA, 53 bp, Artificial; identical to SEQ ID NO: 287416
  Synthetic oligonucleotide

SEQ ID NO: 659434 - DNA, 52 bp, Artificial; identical to SEQ ID NO: 294340
  Synthetic oligonucleotide

SEQ ID NO: 659435 - DNA, 47 bp, Artificial; identical to SEQ ID NO: 287259
  Synthetic oligonucleotide

SEQ ID NO: 659436 - DNA, 55 bp, Artificial; identical to SEQ ID NO: 287348
  Synthetic oligonucleotide

SEQ ID NO: 659437 - DNA, 55 bp, Artificial; identical to SEQ ID NO: 287293
  Synthetic oligonucleotide

SEQ ID NO: 659438 - DNA, 51 bp, Artificial; identical to SEQ ID NO: 294518
  Synthetic oligonucleotide

SEQ ID NO: 659439 - DNA, 55 bp, Artificial; identical to SEQ ID NO: 287570
  Synthetic oligonucleotide

SEQ ID NO: 659440 - DNA, 55 bp, Artificial; identical to SEQ ID NO: 287575
  Synthetic oligonucleotide

SEQ ID NO: 659441 - DNA, 55 bp, Artificial; identical to SEQ ID NO: 287584
  Synthetic oligonucleotide

SEQ ID NO: 659442 - DNA, 55 bp, Artificial; identical to SEQ ID NO: 287586
  Synthetic oligonucleotide

SEQ ID NO: 659443 - DNA, 55 bp, Artificial; identical to SEQ ID NO: 287618
  Synthetic oligonucleotide

SEQ ID NO: 659444 - DNA, 55 bp, Artificial; identical to SEQ ID NO: 287635
  Synthetic oligonucleotide

SEQ ID NO: 659445 - DNA, 55 bp, Artificial; identical to SEQ ID NO: 287609
  Synthetic oligonucleotide

SEQ ID NO: 659446 - DNA, 55 bp, Artificial; identical to SEQ ID NO: 287490
  Synthetic oligonucleotide

SEQ ID NO: 659447 - DNA, 55 bp, Artificial; identical to SEQ ID NO: 287460
  Synthetic oligonucleotide

SEQ ID NO: 659448 - DNA, 56 bp, Artificial; identical to SEQ ID NO: 297281
  Synthetic oligonucleotide

SEQ ID NO: 659449 - DNA, 55 bp, Artificial; identical to SEQ ID NO: 287523
  Synthetic oligonucleotide

SEQ ID NO: 659450 - DNA, 55 bp, Artificial; identical to SEQ ID NO: 287524
  Synthetic oligonucleotide

SEQ ID NO: 659451 - DNA, 55 bp, Artificial; identical to SEQ ID NO: 287532
  Synthetic oligonucleotide

SEQ ID NO: 659452 - DNA, 55 bp, Artificial; identical to SEQ ID NO: 287513
  Synthetic oligonucleotide

SEQ ID NO: 659453 - DNA, 51 bp, Artificial; identical to SEQ ID NO: 294503
  Synthetic oligonucleotide

SEQ ID NO: 659454 - DNA, 55 bp, Artificial; identical to SEQ ID NO: 287521
  Synthetic oligonucleotide

SEQ ID NO: 659455 - DNA, 59 bp, Artificial; identical to SEQ ID NO: 295149
  Synthetic oligonucleotide

SEQ ID NO: 659456 - DNA, 54 bp, Artificial; identical to SEQ ID NO: 287026
  Synthetic oligonucleotide

SEQ ID NO: 659457 - DNA, 51 bp, Artificial; identical to SEQ ID NO: 294455
  Synthetic oligonucleotide

SEQ ID NO: 659458 - DNA, 55 bp, Artificial; identical to SEQ ID NO: 287571
  Synthetic oligonucleotide

SEQ ID NO: 659459 - DNA, 54 bp, Artificial; identical to SEQ ID NO: 293527
  Synthetic oligonucleotide

SEQ ID NO: 659460 - DNA, 50 bp, Artificial; identical to SEQ ID NO: 296413
  Synthetic oligonucleotide

SEQ ID NO: 659461 - DNA, 60 bp, Artificial; identical to SEQ ID NO: 293860
  Synthetic oligonucleotide

SEQ ID NO: 659462 - DNA, 55 bp, Artificial; identical to SEQ ID NO: 287382
  Synthetic oligonucleotide

SEQ ID NO: 659463 - DNA, 58 bp, Artificial; identical to SEQ ID NO: 293882
  Synthetic oligonucleotide

SEQ ID NO: 659464 - DNA, 55 bp, Artificial; identical to SEQ ID NO: 287922
  Synthetic oligonucleotide

SEQ ID NO: 659465 - DNA, 55 bp, Artificial; identical to SEQ ID NO: 287864
  Synthetic oligonucleotide

SEQ ID NO: 659466 - DNA, 56 bp, Artificial; identical to SEQ ID NO: 296327
  Synthetic oligonucleotide

SEQ ID NO: 659467 - DNA, 55 bp, Artificial; identical to SEQ ID NO: 288017
  Synthetic oligonucleotide

SEQ ID NO: 659468 - DNA, 57 bp, Artificial; identical to SEQ ID NO: 296682
  Synthetic oligonucleotide

SEQ ID NO: 659469 - DNA, 55 bp, Artificial; identical to SEQ ID NO: 287958
  Synthetic oligonucleotide

SEQ ID NO: 659470 - DNA, 55 bp, Artificial; identical to SEQ ID NO: 287952
  Synthetic oligonucleotide

SEQ ID NO: 659471 - DNA, 55 bp, Artificial; identical to SEQ ID NO: 287980
  Synthetic oligonucleotide

SEQ ID NO: 659472 - DNA, 55 bp, Artificial; identical to SEQ ID NO: 287726
  Synthetic oligonucleotide

SEQ ID NO: 659473 - DNA, 55 bp, Artificial; identical to SEQ ID NO: 287723
  Synthetic oligonucleotide

SEQ ID NO: 659474 - DNA, 60 bp, Artificial; identical to SEQ ID NO: 292116
  Synthetic oligonucleotide

SEQ ID NO: 659475 - DNA, 50 bp, Artificial; identical to SEQ ID NO: 296578
  Synthetic oligonucleotide

SEQ ID NO: 659476 - DNA, 55 bp, Artificial; identical to SEQ ID NO: 287802
  Synthetic oligonucleotide

SEQ ID NO: 659477 - DNA, 51 bp, Artificial; identical to SEQ ID NO: 294437
  Synthetic oligonucleotide

SEQ ID NO: 659478 - DNA, 55 bp, Artificial; identical to SEQ ID NO: 287837
  Synthetic oligonucleotide

SEQ ID NO: 659479 - DNA, 55 bp, Artificial; identical to SEQ ID NO: 287828
  Synthetic oligonucleotide

SEQ ID NO: 659480 - DNA, 59 bp, Artificial; identical to SEQ ID NO: 292693
  Synthetic oligonucleotide

SEQ ID NO: 659481 - DNA, 55 bp, Artificial; identical to SEQ ID NO: 287744
  Synthetic oligonucleotide

SEQ ID NO: 659482 - DNA, 55 bp, Artificial; identical to SEQ ID NO: 287769
  Synthetic oligonucleotide

SEQ ID NO: 659483 - DNA, 60 bp, Artificial; identical to SEQ ID NO: 292815
  Synthetic oligonucleotide

SEQ ID NO: 659484 - DNA, 55 bp, Artificial; identical to SEQ ID NO: 287780
  Synthetic oligonucleotide

SEQ ID NO: 659485 - DNA, 55 bp, Artificial; identical to SEQ ID NO: 287786
  Synthetic oligonucleotide

SEQ ID NO: 659486 - DNA, 55 bp, Artificial; identical to SEQ ID NO: 287740
  Synthetic oligonucleotide

SEQ ID NO: 659487 - DNA, 55 bp, Artificial; identical to SEQ ID NO: 287749
  Synthetic oligonucleotide

SEQ ID NO: 659488 - DNA, 55 bp, Artificial; identical to SEQ ID NO: 287754
  Synthetic oligonucleotide

SEQ ID NO: 659489 - DNA, 56 bp, Artificial; identical to SEQ ID NO: 292649
  Synthetic oligonucleotide

SEQ ID NO: 659490 - DNA, 55 bp, Artificial; identical to SEQ ID NO: 287834
  Synthetic oligonucleotide

SEQ ID NO: 659491 - DNA, 55 bp, Artificial; identical to SEQ ID NO: 287839
  Synthetic oligonucleotide

SEQ ID NO: 659492 - DNA, 53 bp, Artificial; identical to SEQ ID NO: 287840
  Synthetic oligonucleotide

SEQ ID NO: 659493 - DNA, 56 bp, Artificial; identical to SEQ ID NO: 292582
  Synthetic oligonucleotide

SEQ ID NO: 659494 - DNA, 55 bp, Artificial; identical to SEQ ID NO: 287796
  Synthetic oligonucleotide

SEQ ID NO: 659495 - DNA, 58 bp, Artificial; identical to SEQ ID NO: 295504
  Synthetic oligonucleotide

SEQ ID NO: 659496 - DNA, 55 bp, Artificial; identical to SEQ ID NO: 287799
  Synthetic oligonucleotide

SEQ ID NO: 659497 - DNA, 55 bp, Artificial; identical to SEQ ID NO: 287800
  Synthetic oligonucleotide

SEQ ID NO: 659498 - DNA, 55 bp, Artificial; identical to SEQ ID NO: 287803
  Synthetic oligonucleotide

SEQ ID NO: 659499 - DNA, 51 bp, Artificial; identical to SEQ ID NO: 294892
  Synthetic oligonucleotide

SEQ ID NO: 659500 - DNA, 52 bp, Artificial; identical to SEQ ID NO: 294394
  Synthetic oligonucleotide

SEQ ID NO: 659501 - DNA, 55 bp, Artificial; identical to SEQ ID NO: 287807
  Synthetic oligonucleotide

SEQ ID NO: 659502 - DNA, 55 bp, Artificial; identical to SEQ ID NO: 287808
  Synthetic oligonucleotide

SEQ ID NO: 659503 - DNA, 55 bp, Artificial; identical to SEQ ID NO: 287809
  Synthetic oligonucleotide

SEQ ID NO: 659504 - DNA, 57 bp, Artificial; identical to SEQ ID NO: 293160
  Synthetic oligonucleotide

SEQ ID NO: 659505 - DNA, 58 bp, Artificial; identical to SEQ ID NO: 295371
  Synthetic oligonucleotide

SEQ ID NO: 659506 - DNA, 53 bp, Artificial; identical to SEQ ID NO: 287664
  Synthetic oligonucleotide

SEQ ID NO: 659507 - DNA, 55 bp, Artificial; identical to SEQ ID NO: 287668
  Synthetic oligonucleotide

SEQ ID NO: 659508 - DNA, 55 bp, Artificial; identical to SEQ ID NO: 287670
  Synthetic oligonucleotide

SEQ ID NO: 659509 - DNA, 51 bp, Artificial; identical to SEQ ID NO: 295000
  Synthetic oligonucleotide

SEQ ID NO: 659510 - DNA, 52 bp, Artificial; identical to SEQ ID NO: 293027
  Synthetic oligonucleotide

SEQ ID NO: 659511 - DNA, 55 bp, Artificial; identical to SEQ ID NO: 287713
  Synthetic oligonucleotide

SEQ ID NO: 659512 - DNA, 55 bp, Artificial; identical to SEQ ID NO: 287725
  Synthetic oligonucleotide

SEQ ID NO: 659513 - DNA, 51 bp, Artificial; identical to SEQ ID NO: 294786
  Synthetic oligonucleotide

SEQ ID NO: 659514 - DNA, 54 bp, Artificial; identical to SEQ ID NO: 292060
  Synthetic oligonucleotide

SEQ ID NO: 659515 - DNA, 55 bp, Artificial; identical to SEQ ID NO: 287690
  Synthetic oligonucleotide

SEQ ID NO: 659516 - DNA, 55 bp, Artificial; identical to SEQ ID NO: 287698
  Synthetic oligonucleotide

SEQ ID NO: 659517 - DNA, 52 bp, Artificial; identical to SEQ ID NO: 294244
  Synthetic oligonucleotide

SEQ ID NO: 659518 - DNA, 55 bp, Artificial; identical to SEQ ID NO: 287703
  Synthetic oligonucleotide

SEQ ID NO: 659519 - DNA, 55 bp, Artificial; identical to SEQ ID NO: 287706
  Synthetic oligonucleotide

SEQ ID NO: 659520 - DNA, 55 bp, Artificial; identical to SEQ ID NO: 287712
  Synthetic oligonucleotide

SEQ ID NO: 659521 - DNA, 55 bp, Artificial; identical to SEQ ID NO: 287974
  Synthetic oligonucleotide

SEQ ID NO: 659522 - DNA, 55 bp, Artificial; identical to SEQ ID NO: 287975
  Synthetic oligonucleotide

SEQ ID NO: 659523 - DNA, 55 bp, Artificial; identical to SEQ ID NO: 287978
  Synthetic oligonucleotide

SEQ ID NO: 659524 - DNA, 55 bp, Artificial; identical to SEQ ID NO: 287984
  Synthetic oligonucleotide

SEQ ID NO: 659525 - DNA, 55 bp, Artificial; identical to SEQ ID NO: 287985
  Synthetic oligonucleotide

SEQ ID NO: 659526 - DNA, 55 bp, Artificial; identical to SEQ ID NO: 287990
  Synthetic oligonucleotide

SEQ ID NO: 659527 - DNA, 54 bp, Artificial; identical to SEQ ID NO: 293179
  Synthetic oligonucleotide

SEQ ID NO: 659528 - DNA, 52 bp, Artificial; identical to SEQ ID NO: 294311
  Synthetic oligonucleotide

SEQ ID NO: 659529 - DNA, 52 bp, Artificial; identical to SEQ ID NO: 294313
  Synthetic oligonucleotide

SEQ ID NO: 659530 - DNA, 55 bp, Artificial; identical to SEQ ID NO: 287957
  Synthetic oligonucleotide

SEQ ID NO: 659531 - DNA, 55 bp, Artificial; identical to SEQ ID NO: 287964
  Synthetic oligonucleotide

SEQ ID NO: 659532 - DNA, 55 bp, Artificial; identical to SEQ ID NO: 287965
  Synthetic oligonucleotide

SEQ ID NO: 659533 - DNA, 55 bp, Artificial; identical to SEQ ID NO: 287966
  Synthetic oligonucleotide

SEQ ID NO: 659534 - DNA, 55 bp, Artificial; identical to SEQ ID NO: 288025
  Synthetic oligonucleotide

SEQ ID NO: 659535 - DNA, 55 bp, Artificial; identical to SEQ ID NO: 288030
  Synthetic oligonucleotide

SEQ ID NO: 659536 - DNA, 51 bp, Artificial; identical to SEQ ID NO: 294961
  Synthetic oligonucleotide

SEQ ID NO: 659537 - DNA, 55 bp, Artificial; identical to SEQ ID NO: 288031
  Synthetic oligonucleotide

SEQ ID NO: 659538 - DNA, 55 bp, Artificial; identical to SEQ ID NO: 288032
  Synthetic oligonucleotide

SEQ ID NO: 659539 - DNA, 55 bp, Artificial; identical to SEQ ID NO: 288042
  Synthetic oligonucleotide

SEQ ID NO: 659540 - DNA, 55 bp, Artificial; identical to SEQ ID NO: 288043
  Synthetic oligonucleotide

SEQ ID NO: 659541 - DNA, 55 bp, Artificial; identical to SEQ ID NO: 288047
  Synthetic oligonucleotide

SEQ ID NO: 659542 - DNA, 55 bp, Artificial; identical to SEQ ID NO: 288022
  Synthetic oligonucleotide

SEQ ID NO: 659543 - DNA, 53 bp, Artificial; identical to SEQ ID NO: 287843
  Synthetic oligonucleotide

SEQ ID NO: 659544 - DNA, 55 bp, Artificial; identical to SEQ ID NO: 287867
  Synthetic oligonucleotide

SEQ ID NO: 659545 - DNA, 55 bp, Artificial; identical to SEQ ID NO: 287924
  Synthetic oligonucleotide

SEQ ID NO: 659546 - DNA, 55 bp, Artificial; identical to SEQ ID NO: 287934
  Synthetic oligonucleotide

SEQ ID NO: 659547 - DNA, 55 bp, Artificial; identical to SEQ ID NO: 287942
  Synthetic oligonucleotide

SEQ ID NO: 659548 - DNA, 55 bp, Artificial; identical to SEQ ID NO: 287899
  Synthetic oligonucleotide

SEQ ID NO: 659549 - DNA, 54 bp, Artificial; identical to SEQ ID NO: 287901
  Synthetic oligonucleotide

SEQ ID NO: 659550 - DNA, 55 bp, Artificial; identical to SEQ ID NO: 287903
  Synthetic oligonucleotide

SEQ ID NO: 659551 - DNA, 52 bp, Artificial; identical to SEQ ID NO: 294277
  Synthetic oligonucleotide

SEQ ID NO: 659552 - DNA, 55 bp, Artificial; identical to SEQ ID NO: 287414
  Synthetic oligonucleotide

SEQ ID NO: 659553 - DNA, 55 bp, Artificial; identical to SEQ ID NO: 287386
  Synthetic oligonucleotide

SEQ ID NO: 659554 - DNA, 55 bp, Artificial; identical to SEQ ID NO: 287388
  Synthetic oligonucleotide

SEQ ID NO: 659555 - DNA, 55 bp, Artificial; identical to SEQ ID NO: 287390
  Synthetic oligonucleotide

SEQ ID NO: 659556 - DNA, 55 bp, Artificial; identical to SEQ ID NO: 287441
  Synthetic oligonucleotide

SEQ ID NO: 659557 - DNA, 57 bp, Artificial; identical to SEQ ID NO: 294360
  Synthetic oligonucleotide

SEQ ID NO: 659558 - DNA, 55 bp, Artificial; identical to SEQ ID NO: 287226
  Synthetic oligonucleotide

SEQ ID NO: 659559 - DNA, 55 bp, Artificial; identical to SEQ ID NO: 287375
  Synthetic oligonucleotide

SEQ ID NO: 659560 - DNA, 55 bp, Artificial; identical to SEQ ID NO: 287569
  Synthetic oligonucleotide

SEQ ID NO: 659561 - DNA, 52 bp, Artificial; identical to SEQ ID NO: 294380
  Synthetic oligonucleotide

SEQ ID NO: 659562 - DNA, 55 bp, Artificial; identical to SEQ ID NO: 287546
  Synthetic oligonucleotide

SEQ ID NO: 659563 - DNA, 55 bp, Artificial; identical to SEQ ID NO: 287547
  Synthetic oligonucleotide

SEQ ID NO: 659564 - DNA, 55 bp, Artificial; identical to SEQ ID NO: 287551
  Synthetic oligonucleotide

SEQ ID NO: 659565 - DNA, 51 bp, Artificial; identical to SEQ ID NO: 294918
  Synthetic oligonucleotide

SEQ ID NO: 659566 - DNA, 55 bp, Artificial; identical to SEQ ID NO: 287559
  Synthetic oligonucleotide

SEQ ID NO: 659567 - DNA, 54 bp, Artificial; identical to SEQ ID NO: 293264
  Synthetic oligonucleotide

SEQ ID NO: 659568 - DNA, 55 bp, Artificial; identical to SEQ ID NO: 287620
  Synthetic oligonucleotide

SEQ ID NO: 659569 - DNA, 55 bp, Artificial; identical to SEQ ID NO: 287592
  Synthetic oligonucleotide

SEQ ID NO: 659570 - DNA, 53 bp, Artificial; identical to SEQ ID NO: 293475
  Synthetic oligonucleotide

SEQ ID NO: 659571 - DNA, 55 bp, Artificial; identical to SEQ ID NO: 287486
  Synthetic oligonucleotide

SEQ ID NO: 659572 - DNA, 54 bp, Artificial; identical to SEQ ID NO: 293267
  Synthetic oligonucleotide

SEQ ID NO: 659573 - DNA, 55 bp, Artificial; identical to SEQ ID NO: 287455
  Synthetic oligonucleotide

SEQ ID NO: 659574 - DNA, 54 bp, Artificial; identical to SEQ ID NO: 293738
  Synthetic oligonucleotide

SEQ ID NO: 659575 - DNA, 60 bp, Artificial; identical to SEQ ID NO: 293682
  Synthetic oligonucleotide

SEQ ID NO: 659576 - DNA, 55 bp, Artificial; identical to SEQ ID NO: 287527
  Synthetic oligonucleotide

SEQ ID NO: 659577 - DNA, 55 bp, Artificial; identical to SEQ ID NO: 287529
  Synthetic oligonucleotide

SEQ ID NO: 659578 - DNA, 55 bp, Artificial; identical to SEQ ID NO: 287535
  Synthetic oligonucleotide

SEQ ID NO: 659579 - DNA, 55 bp, Artificial; identical to SEQ ID NO: 287500
  Synthetic oligonucleotide

SEQ ID NO: 659580 - DNA, 55 bp, Artificial; identical to SEQ ID NO: 287507
  Synthetic oligonucleotide

SEQ ID NO: 659581 - DNA, 55 bp, Artificial; identical to SEQ ID NO: 290687
  Synthetic oligonucleotide

SEQ ID NO: 659582 - DNA, 55 bp, Artificial; identical to SEQ ID NO: 290689
  Synthetic oligonucleotide

SEQ ID NO: 659583 - DNA, 55 bp, Artificial; identical to SEQ ID NO: 290691
  Synthetic oligonucleotide

SEQ ID NO: 659584 - DNA, 55 bp, Artificial; identical to SEQ ID NO: 290692
  Synthetic oligonucleotide

SEQ ID NO: 659585 - DNA, 55 bp, Artificial; identical to SEQ ID NO: 290693
  Synthetic oligonucleotide

SEQ ID NO: 659586 - DNA, 55 bp, Artificial; identical to SEQ ID NO: 290695
  Synthetic oligonucleotide

SEQ ID NO: 659587 - DNA, 58 bp, Artificial; identical to SEQ ID NO: 293660
  Synthetic oligonucleotide

SEQ ID NO: 659588 - DNA, 55 bp, Artificial; identical to SEQ ID NO: 290697
  Synthetic oligonucleotide

SEQ ID NO: 659589 - DNA, 55 bp, Artificial; identical to SEQ ID NO: 290698
  Synthetic oligonucleotide

SEQ ID NO: 659590 - DNA, 55 bp, Artificial; identical to SEQ ID NO: 290701
  Synthetic oligonucleotide

SEQ ID NO: 659591 - DNA, 55 bp, Artificial; identical to SEQ ID NO: 290682
  Synthetic oligonucleotide

SEQ ID NO: 659592 - DNA, 55 bp, Artificial; identical to SEQ ID NO: 290680
  Synthetic oligonucleotide

SEQ ID NO: 659593 - DNA, 55 bp, Artificial; identical to SEQ ID NO: 290679
  Synthetic oligonucleotide

SEQ ID NO: 659594 - DNA, 55 bp, Artificial; identical to SEQ ID NO: 290674
  Synthetic oligonucleotide

SEQ ID NO: 659595 - DNA, 55 bp, Artificial; identical to SEQ ID NO: 290673
  Synthetic oligonucleotide

SEQ ID NO: 659596 - DNA, 55 bp, Artificial; identical to SEQ ID NO: 290671
  Synthetic oligonucleotide

SEQ ID NO: 659597 - DNA, 54 bp, Artificial; identical to SEQ ID NO: 293246
  Synthetic oligonucleotide

SEQ ID NO: 659598 - DNA, 55 bp, Artificial; identical to SEQ ID NO: 290670
  Synthetic oligonucleotide

SEQ ID NO: 659599 - DNA, 55 bp, Artificial; identical to SEQ ID NO: 290669
  Synthetic oligonucleotide

SEQ ID NO: 659600 - DNA, 55 bp, Artificial; identical to SEQ ID NO: 290720
  Synthetic oligonucleotide

SEQ ID NO: 659601 - DNA, 55 bp, Artificial; identical to SEQ ID NO: 290721
  Synthetic oligonucleotide

SEQ ID NO: 659602 - DNA, 55 bp, Artificial; identical to SEQ ID NO: 290722
  Synthetic oligonucleotide

SEQ ID NO: 659603 - DNA, 52 bp, Artificial; identical to SEQ ID NO: 294002
  Synthetic oligonucleotide

SEQ ID NO: 659604 - DNA, 55 bp, Artificial; identical to SEQ ID NO: 290723
  Synthetic oligonucleotide

SEQ ID NO: 659605 - DNA, 55 bp, Artificial; identical to SEQ ID NO: 290724
  Synthetic oligonucleotide

SEQ ID NO: 659606 - DNA, 55 bp, Artificial; identical to SEQ ID NO: 290726
  Synthetic oligonucleotide

SEQ ID NO: 659607 - DNA, 55 bp, Artificial; identical to SEQ ID NO: 290730
  Synthetic oligonucleotide

SEQ ID NO: 659608 - DNA, 55 bp, Artificial; identical to SEQ ID NO: 290731
  Synthetic oligonucleotide

SEQ ID NO: 659609 - DNA, 55 bp, Artificial; identical to SEQ ID NO: 290732
  Synthetic oligonucleotide

SEQ ID NO: 659610 - DNA, 55 bp, Artificial; identical to SEQ ID NO: 290733
  Synthetic oligonucleotide

SEQ ID NO: 659611 - DNA, 51 bp, Artificial; identical to SEQ ID NO: 294777
  Synthetic oligonucleotide

SEQ ID NO: 659612 - DNA, 55 bp, Artificial; identical to SEQ ID NO: 290717
  Synthetic oligonucleotide

SEQ ID NO: 659613 - DNA, 55 bp, Artificial; identical to SEQ ID NO: 290715
  Synthetic oligonucleotide

SEQ ID NO: 659614 - DNA, 55 bp, Artificial; identical to SEQ ID NO: 290714
  Synthetic oligonucleotide

SEQ ID NO: 659615 - DNA, 55 bp, Artificial; identical to SEQ ID NO: 290713
  Synthetic oligonucleotide

SEQ ID NO: 659616 - DNA, 55 bp, Artificial; identical to SEQ ID NO: 290712
  Synthetic oligonucleotide

SEQ ID NO: 659617 - DNA, 55 bp, Artificial; identical to SEQ ID NO: 290711
  Synthetic oligonucleotide

SEQ ID NO: 659618 - DNA, 52 bp, Artificial; identical to SEQ ID NO: 294028
  Synthetic oligonucleotide

SEQ ID NO: 659619 - DNA, 55 bp, Artificial; identical to SEQ ID NO: 290704
  Synthetic oligonucleotide

SEQ ID NO: 659620 - DNA, 55 bp, Artificial; identical to SEQ ID NO: 290703
  Synthetic oligonucleotide

SEQ ID NO: 659621 - DNA, 55 bp, Artificial; identical to SEQ ID NO: 290702
  Synthetic oligonucleotide

SEQ ID NO: 659622 - DNA, 55 bp, Artificial; identical to SEQ ID NO: 290629
  Synthetic oligonucleotide

SEQ ID NO: 659623 - DNA, 55 bp, Artificial; identical to SEQ ID NO: 290616
  Synthetic oligonucleotide

SEQ ID NO: 659624 - DNA, 55 bp, Artificial; identical to SEQ ID NO: 290612
  Synthetic oligonucleotide

SEQ ID NO: 659625 - DNA, 55 bp, Artificial; identical to SEQ ID NO: 290610
  Synthetic oligonucleotide

SEQ ID NO: 659626 - DNA, 55 bp, Artificial; identical to SEQ ID NO: 290609
  Synthetic oligonucleotide

SEQ ID NO: 659627 - DNA, 55 bp, Artificial; identical to SEQ ID NO: 290608
  Synthetic oligonucleotide

SEQ ID NO: 659628 - DNA, 55 bp, Artificial; identical to SEQ ID NO: 290607
  Synthetic oligonucleotide

SEQ ID NO: 659629 - DNA, 55 bp, Artificial; identical to SEQ ID NO: 290602
  Synthetic oligonucleotide

SEQ ID NO: 659630 - DNA, 55 bp, Artificial; identical to SEQ ID NO: 290600
  Synthetic oligonucleotide

SEQ ID NO: 659631 - DNA, 54 bp, Artificial; identical to SEQ ID NO: 293314
  Synthetic oligonucleotide

SEQ ID NO: 659632 - DNA, 57 bp, Artificial; identical to SEQ ID NO: 296738
  Synthetic oligonucleotide

SEQ ID NO: 659633 - DNA, 55 bp, Artificial; identical to SEQ ID NO: 290597
  Synthetic oligonucleotide

SEQ ID NO: 659634 - DNA, 55 bp, Artificial; identical to SEQ ID NO: 290596
  Synthetic oligonucleotide

SEQ ID NO: 659635 - DNA, 55 bp, Artificial; identical to SEQ ID NO: 290594
  Synthetic oligonucleotide

SEQ ID NO: 659636 - DNA, 55 bp, Artificial; identical to SEQ ID NO: 290647
  Synthetic oligonucleotide

SEQ ID NO: 659637 - DNA, 55 bp, Artificial; identical to SEQ ID NO: 290648
  Synthetic oligonucleotide

SEQ ID NO: 659638 - DNA, 55 bp, Artificial; identical to SEQ ID NO: 290655
  Synthetic oligonucleotide

SEQ ID NO: 659639 - DNA, 54 bp, Artificial; identical to SEQ ID NO: 293321
  Synthetic oligonucleotide

SEQ ID NO: 659640 - DNA, 54 bp, Artificial; identical to SEQ ID NO: 290656
  Synthetic oligonucleotide

SEQ ID NO: 659641 - DNA, 55 bp, Artificial; identical to SEQ ID NO: 290657
  Synthetic oligonucleotide

SEQ ID NO: 659642 - DNA, 54 bp, Artificial; identical to SEQ ID NO: 293326
  Synthetic oligonucleotide

SEQ ID NO: 659643 - DNA, 55 bp, Artificial; identical to SEQ ID NO: 290658
  Synthetic oligonucleotide

SEQ ID NO: 659644 - DNA, 55 bp, Artificial; identical to SEQ ID NO: 290659
  Synthetic oligonucleotide

SEQ ID NO: 659645 - DNA, 55 bp, Artificial; identical to SEQ ID NO: 290662
  Synthetic oligonucleotide

SEQ ID NO: 659646 - DNA, 55 bp, Artificial; identical to SEQ ID NO: 290664
  Synthetic oligonucleotide

SEQ ID NO: 659647 - DNA, 55 bp, Artificial; identical to SEQ ID NO: 290665
  Synthetic oligonucleotide

SEQ ID NO: 659648 - DNA, 55 bp, Artificial; identical to SEQ ID NO: 290645
  Synthetic oligonucleotide

SEQ ID NO: 659649 - DNA, 60 bp, Artificial; identical to SEQ ID NO: 292471
  Synthetic oligonucleotide

SEQ ID NO: 659650 - DNA, 55 bp, Artificial; identical to SEQ ID NO: 290642
  Synthetic oligonucleotide

SEQ ID NO: 659651 - DNA, 55 bp, Artificial; identical to SEQ ID NO: 290641
  Synthetic oligonucleotide

SEQ ID NO: 659652 - DNA, 55 bp, Artificial; identical to SEQ ID NO: 290638
  Synthetic oligonucleotide

SEQ ID NO: 659653 - DNA, 55 bp, Artificial; identical to SEQ ID NO: 290636
  Synthetic oligonucleotide

SEQ ID NO: 659654 - DNA, 60 bp, Artificial; identical to SEQ ID NO: 291916
  Synthetic oligonucleotide

SEQ ID NO: 659655 - DNA, 51 bp, Artificial; identical to SEQ ID NO: 294792
  Synthetic oligonucleotide

SEQ ID NO: 659656 - DNA, 55 bp, Artificial; identical to SEQ ID NO: 290634
  Synthetic oligonucleotide

SEQ ID NO: 659657 - DNA, 55 bp, Artificial; identical to SEQ ID NO: 290633
  Synthetic oligonucleotide

SEQ ID NO: 659658 - DNA, 55 bp, Artificial; identical to SEQ ID NO: 290631
  Synthetic oligonucleotide

SEQ ID NO: 659659 - DNA, 55 bp, Artificial; identical to SEQ ID NO: 290826
  Synthetic oligonucleotide

SEQ ID NO: 659660 - DNA, 53 bp, Artificial; identical to SEQ ID NO: 293559
  Synthetic oligonucleotide

SEQ ID NO: 659661 - DNA, 55 bp, Artificial; identical to SEQ ID NO: 290829
  Synthetic oligonucleotide

SEQ ID NO: 659662 - DNA, 55 bp, Artificial; identical to SEQ ID NO: 290831
  Synthetic oligonucleotide

SEQ ID NO: 659663 - DNA, 55 bp, Artificial; identical to SEQ ID NO: 290832
  Synthetic oligonucleotide

SEQ ID NO: 659664 - DNA, 53 bp, Artificial; identical to SEQ ID NO: 293557
  Synthetic oligonucleotide

SEQ ID NO: 659665 - DNA, 55 bp, Artificial; identical to SEQ ID NO: 290836
  Synthetic oligonucleotide

SEQ ID NO: 659666 - DNA, 55 bp, Artificial; identical to SEQ ID NO: 290837
  Synthetic oligonucleotide

SEQ ID NO: 659667 - DNA, 55 bp, Artificial; identical to SEQ ID NO: 290839
  Synthetic oligonucleotide

SEQ ID NO: 659668 - DNA, 55 bp, Artificial; identical to SEQ ID NO: 290842
  Synthetic oligonucleotide

SEQ ID NO: 659669 - DNA, 55 bp, Artificial; identical to SEQ ID NO: 290843
  Synthetic oligonucleotide

SEQ ID NO: 659670 - DNA, 55 bp, Artificial; identical to SEQ ID NO: 290824
  Synthetic oligonucleotide

SEQ ID NO: 659671 - DNA, 55 bp, Artificial; identical to SEQ ID NO: 290823
  Synthetic oligonucleotide

SEQ ID NO: 659672 - DNA, 55 bp, Artificial; identical to SEQ ID NO: 290822
  Synthetic oligonucleotide

SEQ ID NO: 659673 - DNA, 57 bp, Artificial; identical to SEQ ID NO: 295826
  Synthetic oligonucleotide

SEQ ID NO: 659674 - DNA, 55 bp, Artificial; identical to SEQ ID NO: 290815
  Synthetic oligonucleotide

SEQ ID NO: 659675 - DNA, 55 bp, Artificial; identical to SEQ ID NO: 290813
  Synthetic oligonucleotide

SEQ ID NO: 659676 - DNA, 55 bp, Artificial; identical to SEQ ID NO: 290810
  Synthetic oligonucleotide

SEQ ID NO: 659677 - DNA, 55 bp, Artificial; identical to SEQ ID NO: 290809
  Synthetic oligonucleotide

SEQ ID NO: 659678 - DNA, 55 bp, Artificial; identical to SEQ ID NO: 290866
  Synthetic oligonucleotide

SEQ ID NO: 659679 - DNA, 55 bp, Artificial; identical to SEQ ID NO: 290867
  Synthetic oligonucleotide

SEQ ID NO: 659680 - DNA, 51 bp, Artificial; identical to SEQ ID NO: 294914
  Synthetic oligonucleotide

SEQ ID NO: 659681 - DNA, 55 bp, Artificial; identical to SEQ ID NO: 290869
  Synthetic oligonucleotide

SEQ ID NO: 659682 - DNA, 55 bp, Artificial; identical to SEQ ID NO: 290873
  Synthetic oligonucleotide

SEQ ID NO: 659683 - DNA, 55 bp, Artificial; identical to SEQ ID NO: 290874
  Synthetic oligonucleotide

SEQ ID NO: 659684 - DNA, 55 bp, Artificial; identical to SEQ ID NO: 290875
  Synthetic oligonucleotide

SEQ ID NO: 659685 - DNA, 52 bp, Artificial; identical to SEQ ID NO: 293956
  Synthetic oligonucleotide

SEQ ID NO: 659686 - DNA, 55 bp, Artificial; identical to SEQ ID NO: 290876
  Synthetic oligonucleotide

SEQ ID NO: 659687 - DNA, 55 bp, Artificial; identical to SEQ ID NO: 290877
  Synthetic oligonucleotide

SEQ ID NO: 659688 - DNA, 55 bp, Artificial; identical to SEQ ID NO: 290878
  Synthetic oligonucleotide

SEQ ID NO: 659689 - DNA, 55 bp, Artificial; identical to SEQ ID NO: 290879
  Synthetic oligonucleotide

SEQ ID NO: 659690 - DNA, 55 bp, Artificial; identical to SEQ ID NO: 290880
  Synthetic oligonucleotide

SEQ ID NO: 659691 - DNA, 55 bp, Artificial; identical to SEQ ID NO: 290860
  Synthetic oligonucleotide

SEQ ID NO: 659692 - DNA, 55 bp, Artificial; identical to SEQ ID NO: 290858
  Synthetic oligonucleotide

SEQ ID NO: 659693 - DNA, 55 bp, Artificial; identical to SEQ ID NO: 290856
  Synthetic oligonucleotide

SEQ ID NO: 659694 - DNA, 55 bp, Artificial; identical to SEQ ID NO: 290855
  Synthetic oligonucleotide

SEQ ID NO: 659695 - DNA, 55 bp, Artificial; identical to SEQ ID NO: 290853
  Synthetic oligonucleotide

SEQ ID NO: 659696 - DNA, 55 bp, Artificial; identical to SEQ ID NO: 290852
  Synthetic oligonucleotide

SEQ ID NO: 659697 - DNA, 53 bp, Artificial; identical to SEQ ID NO: 294416
  Synthetic oligonucleotide

SEQ ID NO: 659698 - DNA, 52 bp, Artificial; identical to SEQ ID NO: 293967
  Synthetic oligonucleotide

SEQ ID NO: 659699 - DNA, 58 bp, Artificial; identical to SEQ ID NO: 295926
  Synthetic oligonucleotide

SEQ ID NO: 659700 - DNA, 55 bp, Artificial; identical to SEQ ID NO: 290851
  Synthetic oligonucleotide

SEQ ID NO: 659701 - DNA, 55 bp, Artificial; identical to SEQ ID NO: 290770
  Synthetic oligonucleotide

SEQ ID NO: 659702 - DNA, 55 bp, Artificial; identical to SEQ ID NO: 290769
  Synthetic oligonucleotide

SEQ ID NO: 659703 - DNA, 55 bp, Artificial; identical to SEQ ID NO: 290768
  Synthetic oligonucleotide

SEQ ID NO: 659704 - DNA, 55 bp, Artificial; identical to SEQ ID NO: 290767
  Synthetic oligonucleotide

SEQ ID NO: 659705 - DNA, 55 bp, Artificial; identical to SEQ ID NO: 290764
  Synthetic oligonucleotide

SEQ ID NO: 659706 - DNA, 60 bp, Artificial; identical to SEQ ID NO: 292883
  Synthetic oligonucleotide

SEQ ID NO: 659707 - DNA, 55 bp, Artificial; identical to SEQ ID NO: 290763
  Synthetic oligonucleotide

SEQ ID NO: 659708 - DNA, 55 bp, Artificial; identical to SEQ ID NO: 290760
  Synthetic oligonucleotide

SEQ ID NO: 659709 - DNA, 55 bp, Artificial; identical to SEQ ID NO: 290759
  Synthetic oligonucleotide

SEQ ID NO: 659710 - DNA, 55 bp, Artificial; identical to SEQ ID NO: 290758
  Synthetic oligonucleotide

SEQ ID NO: 659711 - DNA, 55 bp, Artificial; identical to SEQ ID NO: 290757
  Synthetic oligonucleotide

SEQ ID NO: 659712 - DNA, 55 bp, Artificial; identical to SEQ ID NO: 290756
  Synthetic oligonucleotide

SEQ ID NO: 659713 - DNA, 55 bp, Artificial; identical to SEQ ID NO: 290755
  Synthetic oligonucleotide

SEQ ID NO: 659714 - DNA, 50 bp, Artificial; identical to SEQ ID NO: 290753
  Synthetic oligonucleotide

SEQ ID NO: 659715 - DNA, 55 bp, Artificial; identical to SEQ ID NO: 290751
  Synthetic oligonucleotide

SEQ ID NO: 659716 - DNA, 52 bp, Artificial; identical to SEQ ID NO: 294017
  Synthetic oligonucleotide

SEQ ID NO: 659717 - DNA, 55 bp, Artificial; identical to SEQ ID NO: 290748
  Synthetic oligonucleotide

SEQ ID NO: 659718 - DNA, 51 bp, Artificial; identical to SEQ ID NO: 294856
  Synthetic oligonucleotide

SEQ ID NO: 659719 - DNA, 51 bp, Artificial; identical to SEQ ID NO: 294855
  Synthetic oligonucleotide

SEQ ID NO: 659720 - DNA, 55 bp, Artificial; identical to SEQ ID NO: 290747
  Synthetic oligonucleotide

SEQ ID NO: 659721 - DNA, 55 bp, Artificial; identical to SEQ ID NO: 290744
  Synthetic oligonucleotide

SEQ ID NO: 659722 - DNA, 59 bp, Artificial; identical to SEQ ID NO: 292183
  Synthetic oligonucleotide

SEQ ID NO: 659723 - DNA, 55 bp, Artificial; identical to SEQ ID NO: 290742
  Synthetic oligonucleotide

SEQ ID NO: 659724 - DNA, 55 bp, Artificial; identical to SEQ ID NO: 290740
  Synthetic oligonucleotide

SEQ ID NO: 659725 - DNA, 55 bp, Artificial; identical to SEQ ID NO: 290791
  Synthetic oligonucleotide

SEQ ID NO: 659726 - DNA, 55 bp, Artificial; identical to SEQ ID NO: 290795
  Synthetic oligonucleotide

SEQ ID NO: 659727 - DNA, 55 bp, Artificial; identical to SEQ ID NO: 290801
  Synthetic oligonucleotide

SEQ ID NO: 659728 - DNA, 60 bp, Artificial; identical to SEQ ID NO: 292271
  Synthetic oligonucleotide

SEQ ID NO: 659729 - DNA, 50 bp, Artificial; identical to SEQ ID NO: 297051
  Synthetic oligonucleotide

SEQ ID NO: 659730 - DNA, 55 bp, Artificial; identical to SEQ ID NO: 290806
  Synthetic oligonucleotide

SEQ ID NO: 659731 - DNA, 55 bp, Artificial; identical to SEQ ID NO: 290808
  Synthetic oligonucleotide

SEQ ID NO: 659732 - DNA, 59 bp, Artificial; identical to SEQ ID NO: 294971
  Synthetic oligonucleotide

SEQ ID NO: 659733 - DNA, 55 bp, Artificial; identical to SEQ ID NO: 290787
  Synthetic oligonucleotide

SEQ ID NO: 659734 - DNA, 55 bp, Artificial; identical to SEQ ID NO: 290785
  Synthetic oligonucleotide

SEQ ID NO: 659735 - DNA, 55 bp, Artificial; identical to SEQ ID NO: 290780
  Synthetic oligonucleotide

SEQ ID NO: 659736 - DNA, 55 bp, Artificial; identical to SEQ ID NO: 290778
  Synthetic oligonucleotide

SEQ ID NO: 659737 - DNA, 55 bp, Artificial; identical to SEQ ID NO: 290777
  Synthetic oligonucleotide

SEQ ID NO: 659738 - DNA, 55 bp, Artificial; identical to SEQ ID NO: 290775
  Synthetic oligonucleotide

SEQ ID NO: 659739 - DNA, 55 bp, Artificial; identical to SEQ ID NO: 290773
  Synthetic oligonucleotide

SEQ ID NO: 659740 - DNA, 55 bp, Artificial; identical to SEQ ID NO: 290396
  Synthetic oligonucleotide

SEQ ID NO: 659741 - DNA, 55 bp, Artificial; identical to SEQ ID NO: 290397
  Synthetic oligonucleotide

SEQ ID NO: 659742 - DNA, 55 bp, Artificial; identical to SEQ ID NO: 290398
  Synthetic oligonucleotide

SEQ ID NO: 659743 - DNA, 55 bp, Artificial; identical to SEQ ID NO: 290400
  Synthetic oligonucleotide

SEQ ID NO: 659744 - DNA, 55 bp, Artificial; identical to SEQ ID NO: 290401
  Synthetic oligonucleotide

SEQ ID NO: 659745 - DNA, 55 bp, Artificial; identical to SEQ ID NO: 290407
  Synthetic oligonucleotide

SEQ ID NO: 659746 - DNA, 55 bp, Artificial; identical to SEQ ID NO: 290410
  Synthetic oligonucleotide

SEQ ID NO: 659747 - DNA, 55 bp, Artificial; identical to SEQ ID NO: 290411
  Synthetic oligonucleotide

SEQ ID NO: 659748 - DNA, 55 bp, Artificial; identical to SEQ ID NO: 290412
  Synthetic oligonucleotide

SEQ ID NO: 659749 - DNA, 54 bp, Artificial; identical to SEQ ID NO: 290395
  Synthetic oligonucleotide

SEQ ID NO: 659750 - DNA, 55 bp, Artificial; identical to SEQ ID NO: 290392
  Synthetic oligonucleotide

SEQ ID NO: 659751 - DNA, 55 bp, Artificial; identical to SEQ ID NO: 290391
  Synthetic oligonucleotide

SEQ ID NO: 659752 - DNA, 55 bp, Artificial; identical to SEQ ID NO: 290389
  Synthetic oligonucleotide

SEQ ID NO: 659753 - DNA, 54 bp, Artificial; identical to SEQ ID NO: 293168
  Synthetic oligonucleotide

SEQ ID NO: 659754 - DNA, 56 bp, Artificial; identical to SEQ ID NO: 295760
  Synthetic oligonucleotide

SEQ ID NO: 659755 - DNA, 55 bp, Artificial; identical to SEQ ID NO: 290381
  Synthetic oligonucleotide

SEQ ID NO: 659756 - DNA, 53 bp, Artificial; identical to SEQ ID NO: 290380
  Synthetic oligonucleotide

SEQ ID NO: 659757 - DNA, 55 bp, Artificial; identical to SEQ ID NO: 290379
  Synthetic oligonucleotide

SEQ ID NO: 659758 - DNA, 55 bp, Artificial; identical to SEQ ID NO: 290378
  Synthetic oligonucleotide

SEQ ID NO: 659759 - DNA, 55 bp, Artificial; identical to SEQ ID NO: 290431
  Synthetic oligonucleotide

SEQ ID NO: 659760 - DNA, 55 bp, Artificial; identical to SEQ ID NO: 290432
  Synthetic oligonucleotide

SEQ ID NO: 659761 - DNA, 55 bp, Artificial; identical to SEQ ID NO: 290434
  Synthetic oligonucleotide

SEQ ID NO: 659762 - DNA, 55 bp, Artificial; identical to SEQ ID NO: 290437
  Synthetic oligonucleotide

SEQ ID NO: 659763 - DNA, 55 bp, Artificial; identical to SEQ ID NO: 290442
  Synthetic oligonucleotide

SEQ ID NO: 659764 - DNA, 55 bp, Artificial; identical to SEQ ID NO: 290443
  Synthetic oligonucleotide

SEQ ID NO: 659765 - DNA, 55 bp, Artificial; identical to SEQ ID NO: 290424
  Synthetic oligonucleotide

SEQ ID NO: 659766 - DNA, 55 bp, Artificial; identical to SEQ ID NO: 290423
  Synthetic oligonucleotide

SEQ ID NO: 659767 - DNA, 55 bp, Artificial; identical to SEQ ID NO: 290422
  Synthetic oligonucleotide

SEQ ID NO: 659768 - DNA, 55 bp, Artificial; identical to SEQ ID NO: 290421
  Synthetic oligonucleotide

SEQ ID NO: 659769 - DNA, 55 bp, Artificial; identical to SEQ ID NO: 290417
  Synthetic oligonucleotide

SEQ ID NO: 659770 - DNA, 55 bp, Artificial; identical to SEQ ID NO: 290333
  Synthetic oligonucleotide

SEQ ID NO: 659771 - DNA, 55 bp, Artificial; identical to SEQ ID NO: 290332
  Synthetic oligonucleotide

SEQ ID NO: 659772 - DNA, 55 bp, Artificial; identical to SEQ ID NO: 290330
  Synthetic oligonucleotide

SEQ ID NO: 659773 - DNA, 55 bp, Artificial; identical to SEQ ID NO: 290329
  Synthetic oligonucleotide

SEQ ID NO: 659774 - DNA, 55 bp, Artificial; identical to SEQ ID NO: 290328
  Synthetic oligonucleotide

SEQ ID NO: 659775 - DNA, 58 bp, Artificial; identical to SEQ ID NO: 295338
  Synthetic oligonucleotide

SEQ ID NO: 659776 - DNA, 53 bp, Artificial; identical to SEQ ID NO: 290325
  Synthetic oligonucleotide

SEQ ID NO: 659777 - DNA, 55 bp, Artificial; identical to SEQ ID NO: 290324
  Synthetic oligonucleotide

SEQ ID NO: 659778 - DNA, 55 bp, Artificial; identical to SEQ ID NO: 290323
  Synthetic oligonucleotide

SEQ ID NO: 659779 - DNA, 55 bp, Artificial; identical to SEQ ID NO: 290322
  Synthetic oligonucleotide

SEQ ID NO: 659780 - DNA, 55 bp, Artificial; identical to SEQ ID NO: 290319
  Synthetic oligonucleotide

SEQ ID NO: 659781 - DNA, 55 bp, Artificial; identical to SEQ ID NO: 290318
  Synthetic oligonucleotide

SEQ ID NO: 659782 - DNA, 53 bp, Artificial; identical to SEQ ID NO: 293544
  Synthetic oligonucleotide

SEQ ID NO: 659783 - DNA, 55 bp, Artificial; identical to SEQ ID NO: 290314
  Synthetic oligonucleotide

SEQ ID NO: 659784 - DNA, 55 bp, Artificial; identical to SEQ ID NO: 290313
  Synthetic oligonucleotide

SEQ ID NO: 659785 - DNA, 57 bp, Artificial; identical to SEQ ID NO: 296871
  Synthetic oligonucleotide

SEQ ID NO: 659786 - DNA, 53 bp, Artificial; identical to SEQ ID NO: 293541
  Synthetic oligonucleotide

SEQ ID NO: 659787 - DNA, 55 bp, Artificial; identical to SEQ ID NO: 290311
  Synthetic oligonucleotide

SEQ ID NO: 659788 - DNA, 57 bp, Artificial; identical to SEQ ID NO: 287883
  Synthetic oligonucleotide

SEQ ID NO: 659789 - DNA, 52 bp, Artificial; identical to SEQ ID NO: 294156
  Synthetic oligonucleotide

SEQ ID NO: 659790 - DNA, 55 bp, Artificial; identical to SEQ ID NO: 290309
  Synthetic oligonucleotide

SEQ ID NO: 659791 - DNA, 55 bp, Artificial; identical to SEQ ID NO: 290363
  Synthetic oligonucleotide

SEQ ID NO: 659792 - DNA, 55 bp, Artificial; identical to SEQ ID NO: 290364
  Synthetic oligonucleotide

SEQ ID NO: 659793 - DNA, 55 bp, Artificial; identical to SEQ ID NO: 290366
  Synthetic oligonucleotide

SEQ ID NO: 659794 - DNA, 55 bp, Artificial; identical to SEQ ID NO: 290367
  Synthetic oligonucleotide

SEQ ID NO: 659795 - DNA, 55 bp, Artificial; identical to SEQ ID NO: 290368
  Synthetic oligonucleotide

SEQ ID NO: 659796 - DNA, 55 bp, Artificial; identical to SEQ ID NO: 290369
  Synthetic oligonucleotide

SEQ ID NO: 659797 - DNA, 55 bp, Artificial; identical to SEQ ID NO: 290374
  Synthetic oligonucleotide

SEQ ID NO: 659798 - DNA, 55 bp, Artificial; identical to SEQ ID NO: 290376
  Synthetic oligonucleotide

SEQ ID NO: 659799 - DNA, 57 bp, Artificial; identical to SEQ ID NO: 296282
  Synthetic oligonucleotide

SEQ ID NO: 659800 - DNA, 55 bp, Artificial; identical to SEQ ID NO: 290377
  Synthetic oligonucleotide

SEQ ID NO: 659801 - DNA, 55 bp, Artificial; identical to SEQ ID NO: 290361
  Synthetic oligonucleotide

SEQ ID NO: 659802 - DNA, 55 bp, Artificial; identical to SEQ ID NO: 290357
  Synthetic oligonucleotide

SEQ ID NO: 659803 - DNA, 55 bp, Artificial; identical to SEQ ID NO: 290354
  Synthetic oligonucleotide

SEQ ID NO: 659804 - DNA, 55 bp, Artificial; identical to SEQ ID NO: 290353
  Synthetic oligonucleotide

SEQ ID NO: 659805 - DNA, 59 bp, Artificial; identical to SEQ ID NO: 295048
  Synthetic oligonucleotide

SEQ ID NO: 659806 - DNA, 56 bp, Artificial; identical to SEQ ID NO: 286926
  Synthetic oligonucleotide

SEQ ID NO: 659807 - DNA, 55 bp, Artificial; identical to SEQ ID NO: 290351
  Synthetic oligonucleotide

SEQ ID NO: 659808 - DNA, 55 bp, Artificial; identical to SEQ ID NO: 290350
  Synthetic oligonucleotide

SEQ ID NO: 659809 - DNA, 55 bp, Artificial; identical to SEQ ID NO: 290347
  Synthetic oligonucleotide

SEQ ID NO: 659810 - DNA, 55 bp, Artificial; identical to SEQ ID NO: 290344
  Synthetic oligonucleotide

SEQ ID NO: 659811 - DNA, 55 bp, Artificial; identical to SEQ ID NO: 290540
  Synthetic oligonucleotide

SEQ ID NO: 659812 - DNA, 55 bp, Artificial; identical to SEQ ID NO: 290543
  Synthetic oligonucleotide

SEQ ID NO: 659813 - DNA, 55 bp, Artificial; identical to SEQ ID NO: 290546
  Synthetic oligonucleotide

SEQ ID NO: 659814 - DNA, 55 bp, Artificial; identical to SEQ ID NO: 290548
  Synthetic oligonucleotide

SEQ ID NO: 659815 - DNA, 55 bp, Artificial; identical to SEQ ID NO: 290550
  Synthetic oligonucleotide

SEQ ID NO: 659816 - DNA, 51 bp, Artificial; identical to SEQ ID NO: 294499
  Synthetic oligonucleotide

SEQ ID NO: 659817 - DNA, 55 bp, Artificial; identical to SEQ ID NO: 290551
  Synthetic oligonucleotide

SEQ ID NO: 659818 - DNA, 55 bp, Artificial; identical to SEQ ID NO: 290556
  Synthetic oligonucleotide

SEQ ID NO: 659819 - DNA, 50 bp, Artificial; identical to SEQ ID NO: 296555
  Synthetic oligonucleotide

SEQ ID NO: 659820 - DNA, 55 bp, Artificial; identical to SEQ ID NO: 290536
  Synthetic oligonucleotide

SEQ ID NO: 659821 - DNA, 55 bp, Artificial; identical to SEQ ID NO: 290535
  Synthetic oligonucleotide

SEQ ID NO: 659822 - DNA, 55 bp, Artificial; identical to SEQ ID NO: 290533
  Synthetic oligonucleotide

SEQ ID NO: 659823 - DNA, 54 bp, Artificial; identical to SEQ ID NO: 290532
  Synthetic oligonucleotide

SEQ ID NO: 659824 - DNA, 55 bp, Artificial; identical to SEQ ID NO: 290530
  Synthetic oligonucleotide

SEQ ID NO: 659825 - DNA, 60 bp, Artificial; identical to SEQ ID NO: 288539
  Synthetic oligonucleotide

SEQ ID NO: 659826 - DNA, 55 bp, Artificial; identical to SEQ ID NO: 290526
  Synthetic oligonucleotide

SEQ ID NO: 659827 - DNA, 55 bp, Artificial; identical to SEQ ID NO: 290522
  Synthetic oligonucleotide

SEQ ID NO: 659828 - DNA, 55 bp, Artificial; identical to SEQ ID NO: 290521
  Synthetic oligonucleotide

SEQ ID NO: 659829 - DNA, 55 bp, Artificial; identical to SEQ ID NO: 290575
  Synthetic oligonucleotide

SEQ ID NO: 659830 - DNA, 55 bp, Artificial; identical to SEQ ID NO: 290578
  Synthetic oligonucleotide

SEQ ID NO: 659831 - DNA, 55 bp, Artificial; identical to SEQ ID NO: 290579
  Synthetic oligonucleotide

SEQ ID NO: 659832 - DNA, 55 bp, Artificial; identical to SEQ ID NO: 290580
  Synthetic oligonucleotide

SEQ ID NO: 659833 - DNA, 55 bp, Artificial; identical to SEQ ID NO: 290583
  Synthetic oligonucleotide

SEQ ID NO: 659834 - DNA, 55 bp, Artificial; identical to SEQ ID NO: 290584
  Synthetic oligonucleotide

SEQ ID NO: 659835 - DNA, 51 bp, Artificial; identical to SEQ ID NO: 294458
  Synthetic oligonucleotide

SEQ ID NO: 659836 - DNA, 60 bp, Artificial; identical to SEQ ID NO: 290182
  Synthetic oligonucleotide

SEQ ID NO: 659837 - DNA, 59 bp, Artificial; identical to SEQ ID NO: 290293
  Synthetic oligonucleotide

SEQ ID NO: 659838 - DNA, 55 bp, Artificial; identical to SEQ ID NO: 290587
  Synthetic oligonucleotide

SEQ ID NO: 659839 - DNA, 51 bp, Artificial; identical to SEQ ID NO: 290588
  Synthetic oligonucleotide

SEQ ID NO: 659840 - DNA, 55 bp, Artificial; identical to SEQ ID NO: 290589
  Synthetic oligonucleotide

SEQ ID NO: 659841 - DNA, 55 bp, Artificial; identical to SEQ ID NO: 290591
  Synthetic oligonucleotide

SEQ ID NO: 659842 - DNA, 60 bp, Artificial; identical to SEQ ID NO: 290960
  Synthetic oligonucleotide

SEQ ID NO: 659843 - DNA, 54 bp, Artificial; identical to SEQ ID NO: 290592
  Synthetic oligonucleotide

SEQ ID NO: 659844 - DNA, 55 bp, Artificial; identical to SEQ ID NO: 290574
  Synthetic oligonucleotide

SEQ ID NO: 659845 - DNA, 55 bp, Artificial; identical to SEQ ID NO: 290573
  Synthetic oligonucleotide

SEQ ID NO: 659846 - DNA, 55 bp, Artificial; identical to SEQ ID NO: 290567
  Synthetic oligonucleotide

SEQ ID NO: 659847 - DNA, 55 bp, Artificial; identical to SEQ ID NO: 290565
  Synthetic oligonucleotide

SEQ ID NO: 659848 - DNA, 55 bp, Artificial; identical to SEQ ID NO: 290563
  Synthetic oligonucleotide

SEQ ID NO: 659849 - DNA, 55 bp, Artificial; identical to SEQ ID NO: 292960
  Synthetic oligonucleotide

SEQ ID NO: 659850 - DNA, 55 bp, Artificial; identical to SEQ ID NO: 290562
  Synthetic oligonucleotide

SEQ ID NO: 659851 - DNA, 55 bp, Artificial; identical to SEQ ID NO: 290561
  Synthetic oligonucleotide

SEQ ID NO: 659852 - DNA, 54 bp, Artificial; identical to SEQ ID NO: 290559
  Synthetic oligonucleotide

SEQ ID NO: 659853 - DNA, 56 bp, Artificial; identical to SEQ ID NO: 292626
  Synthetic oligonucleotide

SEQ ID NO: 659854 - DNA, 55 bp, Artificial; identical to SEQ ID NO: 290558
  Synthetic oligonucleotide

SEQ ID NO: 659855 - DNA, 55 bp, Artificial; identical to SEQ ID NO: 290557
  Synthetic oligonucleotide

SEQ ID NO: 659856 - DNA, 58 bp, Artificial; identical to SEQ ID NO: 291626
  Synthetic oligonucleotide

SEQ ID NO: 659857 - DNA, 55 bp, Artificial; identical to SEQ ID NO: 290483
  Synthetic oligonucleotide

SEQ ID NO: 659858 - DNA, 55 bp, Artificial; identical to SEQ ID NO: 290481
  Synthetic oligonucleotide

SEQ ID NO: 659859 - DNA, 55 bp, Artificial; identical to SEQ ID NO: 290480
  Synthetic oligonucleotide

SEQ ID NO: 659860 - DNA, 55 bp, Artificial; identical to SEQ ID NO: 290477
  Synthetic oligonucleotide

SEQ ID NO: 659861 - DNA, 60 bp, Artificial; identical to SEQ ID NO: 288849
  Synthetic oligonucleotide

SEQ ID NO: 659862 - DNA, 55 bp, Artificial; identical to SEQ ID NO: 290472
  Synthetic oligonucleotide

SEQ ID NO: 659863 - DNA, 55 bp, Artificial; identical to SEQ ID NO: 290470
  Synthetic oligonucleotide

SEQ ID NO: 659864 - DNA, 54 bp, Artificial; identical to SEQ ID NO: 293394
  Synthetic oligonucleotide

SEQ ID NO: 659865 - DNA, 54 bp, Artificial; identical to SEQ ID NO: 290465
  Synthetic oligonucleotide

SEQ ID NO: 659866 - DNA, 55 bp, Artificial; identical to SEQ ID NO: 290464
  Synthetic oligonucleotide

SEQ ID NO: 659867 - DNA, 55 bp, Artificial; identical to SEQ ID NO: 290463
  Synthetic oligonucleotide

SEQ ID NO: 659868 - DNA, 55 bp, Artificial; identical to SEQ ID NO: 290462
  Synthetic oligonucleotide

SEQ ID NO: 659869 - DNA, 55 bp, Artificial; identical to SEQ ID NO: 290461
  Synthetic oligonucleotide

SEQ ID NO: 659870 - DNA, 55 bp, Artificial; identical to SEQ ID NO: 290459
  Synthetic oligonucleotide

SEQ ID NO: 659871 - DNA, 52 bp, Artificial; identical to SEQ ID NO: 294207
  Synthetic oligonucleotide

SEQ ID NO: 659872 - DNA, 55 bp, Artificial; identical to SEQ ID NO: 290455
  Synthetic oligonucleotide

SEQ ID NO: 659873 - DNA, 55 bp, Artificial; identical to SEQ ID NO: 290454
  Synthetic oligonucleotide

SEQ ID NO: 659874 - DNA, 53 bp, Artificial; identical to SEQ ID NO: 286715
  Synthetic oligonucleotide

SEQ ID NO: 659875 - DNA, 51 bp, Artificial; identical to SEQ ID NO: 294442
  Synthetic oligonucleotide

SEQ ID NO: 659876 - DNA, 54 bp, Artificial; identical to SEQ ID NO: 293362
  Synthetic oligonucleotide

SEQ ID NO: 659877 - DNA, 55 bp, Artificial; identical to SEQ ID NO: 290503
  Synthetic oligonucleotide

SEQ ID NO: 659878 - DNA, 52 bp, Artificial; identical to SEQ ID NO: 294213
  Synthetic oligonucleotide

SEQ ID NO: 659879 - DNA, 55 bp, Artificial; identical to SEQ ID NO: 290507
  Synthetic oligonucleotide

SEQ ID NO: 659880 - DNA, 60 bp, Artificial; identical to SEQ ID NO: 287594
  Synthetic oligonucleotide

SEQ ID NO: 659881 - DNA, 55 bp, Artificial; identical to SEQ ID NO: 290509
  Synthetic oligonucleotide

SEQ ID NO: 659882 - DNA, 55 bp, Artificial; identical to SEQ ID NO: 290511
  Synthetic oligonucleotide

SEQ ID NO: 659883 - DNA, 55 bp, Artificial; identical to SEQ ID NO: 290513
  Synthetic oligonucleotide

SEQ ID NO: 659884 - DNA, 55 bp, Artificial; identical to SEQ ID NO: 290517
  Synthetic oligonucleotide

SEQ ID NO: 659885 - DNA, 52 bp, Artificial; identical to SEQ ID NO: 294217
  Synthetic oligonucleotide

SEQ ID NO: 659886 - DNA, 53 bp, Artificial; identical to SEQ ID NO: 293483
  Synthetic oligonucleotide

SEQ ID NO: 659887 - DNA, 56 bp, Artificial; identical to SEQ ID NO: 287505
  Synthetic oligonucleotide

SEQ ID NO: 659888 - DNA, 55 bp, Artificial; identical to SEQ ID NO: 290500
  Synthetic oligonucleotide

SEQ ID NO: 659889 - DNA, 56 bp, Artificial; identical to SEQ ID NO: 297059
  Synthetic oligonucleotide

SEQ ID NO: 659890 - DNA, 58 bp, Artificial; identical to SEQ ID NO: 287428
  Synthetic oligonucleotide

SEQ ID NO: 659891 - DNA, 55 bp, Artificial; identical to SEQ ID NO: 290496
  Synthetic oligonucleotide

SEQ ID NO: 659892 - DNA, 55 bp, Artificial; identical to SEQ ID NO: 290495
  Synthetic oligonucleotide

SEQ ID NO: 659893 - DNA, 56 bp, Artificial; identical to SEQ ID NO: 296926
  Synthetic oligonucleotide

SEQ ID NO: 659894 - DNA, 55 bp, Artificial; identical to SEQ ID NO: 290490
  Synthetic oligonucleotide

SEQ ID NO: 659895 - DNA, 53 bp, Artificial; identical to SEQ ID NO: 293497
  Synthetic oligonucleotide

SEQ ID NO: 659896 - DNA, 55 bp, Artificial; identical to SEQ ID NO: 290489
  Synthetic oligonucleotide

SEQ ID NO: 659897 - DNA, 53 bp, Artificial; identical to SEQ ID NO: 290488
  Synthetic oligonucleotide

SEQ ID NO: 659898 - DNA, 52 bp, Artificial; identical to SEQ ID NO: 294848
  Synthetic oligonucleotide

SEQ ID NO: 659899 - DNA, 55 bp, Artificial; identical to SEQ ID NO: 290486
  Synthetic oligonucleotide

SEQ ID NO: 659900 - DNA, 55 bp, Artificial; identical to SEQ ID NO: 290485
  Synthetic oligonucleotide

SEQ ID NO: 659901 - DNA, 55 bp, Artificial; identical to SEQ ID NO: 291251
  Synthetic oligonucleotide

SEQ ID NO: 659902 - DNA, 55 bp, Artificial; identical to SEQ ID NO: 291253
  Synthetic oligonucleotide

SEQ ID NO: 659903 - DNA, 54 bp, Artificial; identical to SEQ ID NO: 291255
  Synthetic oligonucleotide

SEQ ID NO: 659904 - DNA, 55 bp, Artificial; identical to SEQ ID NO: 291256
  Synthetic oligonucleotide

SEQ ID NO: 659905 - DNA, 56 bp, Artificial; identical to SEQ ID NO: 295626
  Synthetic oligonucleotide

SEQ ID NO: 659906 - DNA, 52 bp, Artificial; identical to SEQ ID NO: 295737
  Synthetic oligonucleotide

SEQ ID NO: 659907 - DNA, 54 bp, Artificial; identical to SEQ ID NO: 291262
  Synthetic oligonucleotide

SEQ ID NO: 659908 - DNA, 55 bp, Artificial; identical to SEQ ID NO: 291263
  Synthetic oligonucleotide

SEQ ID NO: 659909 - DNA, 60 bp, Artificial; identical to SEQ ID NO: 296404
  Synthetic oligonucleotide

SEQ ID NO: 659910 - DNA, 55 bp, Artificial; identical to SEQ ID NO: 291265
  Synthetic oligonucleotide

SEQ ID NO: 659911 - DNA, 55 bp, Artificial; identical to SEQ ID NO: 291267
  Synthetic oligonucleotide

SEQ ID NO: 659912 - DNA, 50 bp, Artificial; identical to SEQ ID NO: 296711
  Synthetic oligonucleotide

SEQ ID NO: 659913 - DNA, 55 bp, Artificial; identical to SEQ ID NO: 291268
  Synthetic oligonucleotide

SEQ ID NO: 659914 - DNA, 55 bp, Artificial; identical to SEQ ID NO: 291250
  Synthetic oligonucleotide

SEQ ID NO: 659915 - DNA, 55 bp, Artificial; identical to SEQ ID NO: 291247
  Synthetic oligonucleotide

SEQ ID NO: 659916 - DNA, 55 bp, Artificial; identical to SEQ ID NO: 291245
  Synthetic oligonucleotide

SEQ ID NO: 659917 - DNA, 55 bp, Artificial; identical to SEQ ID NO: 291244
  Synthetic oligonucleotide

SEQ ID NO: 659918 - DNA, 55 bp, Artificial; identical to SEQ ID NO: 291243
  Synthetic oligonucleotide

SEQ ID NO: 659919 - DNA, 55 bp, Artificial; identical to SEQ ID NO: 291242
  Synthetic oligonucleotide

SEQ ID NO: 659920 - DNA, 55 bp, Artificial; identical to SEQ ID NO: 291241
  Synthetic oligonucleotide

SEQ ID NO: 659921 - DNA, 55 bp, Artificial; identical to SEQ ID NO: 291240
  Synthetic oligonucleotide

SEQ ID NO: 659922 - DNA, 55 bp, Artificial; identical to SEQ ID NO: 291237
  Synthetic oligonucleotide

SEQ ID NO: 659923 - DNA, 52 bp, Artificial; identical to SEQ ID NO: 294186
  Synthetic oligonucleotide

SEQ ID NO: 659924 - DNA, 55 bp, Artificial; identical to SEQ ID NO: 291287
  Synthetic oligonucleotide

SEQ ID NO: 659925 - DNA, 55 bp, Artificial; identical to SEQ ID NO: 291288
  Synthetic oligonucleotide

SEQ ID NO: 659926 - DNA, 55 bp, Artificial; identical to SEQ ID NO: 291289
  Synthetic oligonucleotide

SEQ ID NO: 659927 - DNA, 53 bp, Artificial; identical to SEQ ID NO: 293459
  Synthetic oligonucleotide

SEQ ID NO: 659928 - DNA, 55 bp, Artificial; identical to SEQ ID NO: 291295
  Synthetic oligonucleotide

SEQ ID NO: 659929 - DNA, 55 bp, Artificial; identical to SEQ ID NO: 291296
  Synthetic oligonucleotide

SEQ ID NO: 659930 - DNA, 50 bp, Artificial; identical to SEQ ID NO: 296747
  Synthetic oligonucleotide

SEQ ID NO: 659931 - DNA, 55 bp, Artificial; identical to SEQ ID NO: 291300
  Synthetic oligonucleotide

SEQ ID NO: 659932 - DNA, 54 bp, Artificial; identical to SEQ ID NO: 291304
  Synthetic oligonucleotide

SEQ ID NO: 659933 - DNA, 58 bp, Artificial; identical to SEQ ID NO: 290593
  Synthetic oligonucleotide

SEQ ID NO: 659934 - DNA, 55 bp, Artificial; identical to SEQ ID NO: 291285
  Synthetic oligonucleotide

SEQ ID NO: 659935 - DNA, 49 bp, Artificial; identical to SEQ ID NO: 291284
  Synthetic oligonucleotide

SEQ ID NO: 659936 - DNA, 55 bp, Artificial; identical to SEQ ID NO: 291281
  Synthetic oligonucleotide

SEQ ID NO: 659937 - DNA, 55 bp, Artificial; identical to SEQ ID NO: 291280
  Synthetic oligonucleotide

SEQ ID NO: 659938 - DNA, 52 bp, Artificial; identical to SEQ ID NO: 294196
  Synthetic oligonucleotide

SEQ ID NO: 659939 - DNA, 55 bp, Artificial; identical to SEQ ID NO: 291278
  Synthetic oligonucleotide

SEQ ID NO: 659940 - DNA, 55 bp, Artificial; identical to SEQ ID NO: 291273
  Synthetic oligonucleotide

SEQ ID NO: 659941 - DNA, 55 bp, Artificial; identical to SEQ ID NO: 291272
  Synthetic oligonucleotide

SEQ ID NO: 659942 - DNA, 55 bp, Artificial; identical to SEQ ID NO: 291270
  Synthetic oligonucleotide

SEQ ID NO: 659943 - DNA, 60 bp, Artificial; identical to SEQ ID NO: 290672
  Synthetic oligonucleotide

SEQ ID NO: 659944 - DNA, 55 bp, Artificial; identical to SEQ ID NO: 291199
  Synthetic oligonucleotide

SEQ ID NO: 659945 - DNA, 55 bp, Artificial; identical to SEQ ID NO: 291198
  Synthetic oligonucleotide

SEQ ID NO: 659946 - DNA, 55 bp, Artificial; identical to SEQ ID NO: 291195
  Synthetic oligonucleotide

SEQ ID NO: 659947 - DNA, 51 bp, Artificial; identical to SEQ ID NO: 294728
  Synthetic oligonucleotide

SEQ ID NO: 659948 - DNA, 55 bp, Artificial; identical to SEQ ID NO: 291193
  Synthetic oligonucleotide

SEQ ID NO: 659949 - DNA, 55 bp, Artificial; identical to SEQ ID NO: 291190
  Synthetic oligonucleotide

SEQ ID NO: 659950 - DNA, 55 bp, Artificial; identical to SEQ ID NO: 291189
  Synthetic oligonucleotide

SEQ ID NO: 659951 - DNA, 55 bp, Artificial; identical to SEQ ID NO: 291186
  Synthetic oligonucleotide

SEQ ID NO: 659952 - DNA, 55 bp, Artificial; identical to SEQ ID NO: 291185
  Synthetic oligonucleotide

SEQ ID NO: 659953 - DNA, 55 bp, Artificial; identical to SEQ ID NO: 291184
  Synthetic oligonucleotide

SEQ ID NO: 659954 - DNA, 55 bp, Artificial; identical to SEQ ID NO: 291181
  Synthetic oligonucleotide

SEQ ID NO: 659955 - DNA, 53 bp, Artificial; identical to SEQ ID NO: 293555
  Synthetic oligonucleotide

SEQ ID NO: 659956 - DNA, 54 bp, Artificial; identical to SEQ ID NO: 293126
  Synthetic oligonucleotide

SEQ ID NO: 659957 - DNA, 55 bp, Artificial; identical to SEQ ID NO: 291179
  Synthetic oligonucleotide

SEQ ID NO: 659958 - DNA, 55 bp, Artificial; identical to SEQ ID NO: 291178
  Synthetic oligonucleotide

SEQ ID NO: 659959 - DNA, 55 bp, Artificial; identical to SEQ ID NO: 291177
  Synthetic oligonucleotide

SEQ ID NO: 659960 - DNA, 59 bp, Artificial; identical to SEQ ID NO: 291593
  Synthetic oligonucleotide

SEQ ID NO: 659961 - DNA, 55 bp, Artificial; identical to SEQ ID NO: 291173
  Synthetic oligonucleotide

SEQ ID NO: 659962 - DNA, 55 bp, Artificial; identical to SEQ ID NO: 291169
  Synthetic oligonucleotide

SEQ ID NO: 659963 - DNA, 52 bp, Artificial; identical to SEQ ID NO: 294056
  Synthetic oligonucleotide

SEQ ID NO: 659964 - DNA, 55 bp, Artificial; identical to SEQ ID NO: 291223
  Synthetic oligonucleotide

SEQ ID NO: 659965 - DNA, 55 bp, Artificial; identical to SEQ ID NO: 291224
  Synthetic oligonucleotide

SEQ ID NO: 659966 - DNA, 55 bp, Artificial; identical to SEQ ID NO: 291226
  Synthetic oligonucleotide

SEQ ID NO: 659967 - DNA, 55 bp, Artificial; identical to SEQ ID NO: 291228
  Synthetic oligonucleotide

SEQ ID NO: 659968 - DNA, 55 bp, Artificial; identical to SEQ ID NO: 291229
  Synthetic oligonucleotide

SEQ ID NO: 659969 - DNA, 55 bp, Artificial; identical to SEQ ID NO: 291231
  Synthetic oligonucleotide

SEQ ID NO: 659970 - DNA, 55 bp, Artificial; identical to SEQ ID NO: 291232
  Synthetic oligonucleotide

SEQ ID NO: 659971 - DNA, 55 bp, Artificial; identical to SEQ ID NO: 291215
  Synthetic oligonucleotide

SEQ ID NO: 659972 - DNA, 51 bp, Artificial; identical to SEQ ID NO: 294703
  Synthetic oligonucleotide

SEQ ID NO: 659973 - DNA, 55 bp, Artificial; identical to SEQ ID NO: 291212
  Synthetic oligonucleotide

SEQ ID NO: 659974 - DNA, 55 bp, Artificial; identical to SEQ ID NO: 291210
  Synthetic oligonucleotide

SEQ ID NO: 659975 - DNA, 51 bp, Artificial; identical to SEQ ID NO: 294710
  Synthetic oligonucleotide

SEQ ID NO: 659976 - DNA, 55 bp, Artificial; identical to SEQ ID NO: 291206
  Synthetic oligonucleotide

SEQ ID NO: 659977 - DNA, 55 bp, Artificial; identical to SEQ ID NO: 291201
  Synthetic oligonucleotide

SEQ ID NO: 659978 - DNA, 54 bp, Artificial; identical to SEQ ID NO: 293074
  Synthetic oligonucleotide

SEQ ID NO: 659979 - DNA, 55 bp, Artificial; identical to SEQ ID NO: 291398
  Synthetic oligonucleotide

SEQ ID NO: 659980 - DNA, 55 bp, Artificial; identical to SEQ ID NO: 291399
  Synthetic oligonucleotide

SEQ ID NO: 659981 - DNA, 55 bp, Artificial; identical to SEQ ID NO: 291408
  Synthetic oligonucleotide

SEQ ID NO: 659982 - DNA, 60 bp, Artificial; identical to SEQ ID NO: 291360
  Synthetic oligonucleotide

SEQ ID NO: 659983 - DNA, 55 bp, Artificial; identical to SEQ ID NO: 291409
  Synthetic oligonucleotide

SEQ ID NO: 659984 - DNA, 55 bp, Artificial; identical to SEQ ID NO: 291410
  Synthetic oligonucleotide

SEQ ID NO: 659985 - DNA, 55 bp, Artificial; identical to SEQ ID NO: 291394
  Synthetic oligonucleotide

SEQ ID NO: 659986 - DNA, 55 bp, Artificial; identical to SEQ ID NO: 291390
  Synthetic oligonucleotide

SEQ ID NO: 659987 - DNA, 55 bp, Artificial; identical to SEQ ID NO: 291388
  Synthetic oligonucleotide

SEQ ID NO: 659988 - DNA, 55 bp, Artificial; identical to SEQ ID NO: 291387
  Synthetic oligonucleotide

SEQ ID NO: 659989 - DNA, 53 bp, Artificial; identical to SEQ ID NO: 293550
  Synthetic oligonucleotide

SEQ ID NO: 659990 - DNA, 55 bp, Artificial; identical to SEQ ID NO: 291384
  Synthetic oligonucleotide

SEQ ID NO: 659991 - DNA, 55 bp, Artificial; identical to SEQ ID NO: 291380
  Synthetic oligonucleotide

SEQ ID NO: 659992 - DNA, 55 bp, Artificial; identical to SEQ ID NO: 291432
  Synthetic oligonucleotide

SEQ ID NO: 659993 - DNA, 50 bp, Artificial; identical to SEQ ID NO: 287096
  Synthetic oligonucleotide

SEQ ID NO: 659994 - DNA, 55 bp, Artificial; identical to SEQ ID NO: 291441
  Synthetic oligonucleotide

SEQ ID NO: 659995 - DNA, 52 bp, Artificial; identical to SEQ ID NO: 294070
  Synthetic oligonucleotide

SEQ ID NO: 659996 - DNA, 55 bp, Artificial; identical to SEQ ID NO: 291442
  Synthetic oligonucleotide

SEQ ID NO: 659997 - DNA, 54 bp, Artificial; identical to SEQ ID NO: 293097
  Synthetic oligonucleotide

SEQ ID NO: 659998 - DNA, 55 bp, Artificial; identical to SEQ ID NO: 291445
  Synthetic oligonucleotide

SEQ ID NO: 659999 - DNA, 53 bp, Artificial; identical to SEQ ID NO: 289705
  Synthetic oligonucleotide

SEQ ID NO: 660000 - DNA, 51 bp, Artificial; identical to SEQ ID NO: 294585
  Synthetic oligonucleotide

SEQ ID NO: 660001 - DNA, 50 bp, Artificial; identical to SEQ ID NO: 287073
  Synthetic oligonucleotide

SEQ ID NO: 660002 - DNA, 55 bp, Artificial; identical to SEQ ID NO: 291423
  Synthetic oligonucleotide

SEQ ID NO: 660003 - DNA, 51 bp, Artificial; identical to SEQ ID NO: 294587
  Synthetic oligonucleotide

SEQ ID NO: 660004 - DNA, 55 bp, Artificial; identical to SEQ ID NO: 291422
  Synthetic oligonucleotide

SEQ ID NO: 660005 - DNA, 55 bp, Artificial; identical to SEQ ID NO: 291419
  Synthetic oligonucleotide

SEQ ID NO: 660006 - DNA, 55 bp, Artificial; identical to SEQ ID NO: 291418
  Synthetic oligonucleotide

SEQ ID NO: 660007 - DNA, 57 bp, Artificial; identical to SEQ ID NO: 289605
  Synthetic oligonucleotide

SEQ ID NO: 660008 - DNA, 52 bp, Artificial; identical to SEQ ID NO: 294077
  Synthetic oligonucleotide

SEQ ID NO: 660009 - DNA, 55 bp, Artificial; identical to SEQ ID NO: 291414
  Synthetic oligonucleotide

SEQ ID NO: 660010 - DNA, 55 bp, Artificial; identical to SEQ ID NO: 291324
  Synthetic oligonucleotide

SEQ ID NO: 660011 - DNA, 55 bp, Artificial; identical to SEQ ID NO: 291325
  Synthetic oligonucleotide

SEQ ID NO: 660012 - DNA, 55 bp, Artificial; identical to SEQ ID NO: 291326
  Synthetic oligonucleotide

SEQ ID NO: 660013 - DNA, 55 bp, Artificial; identical to SEQ ID NO: 291329
  Synthetic oligonucleotide

SEQ ID NO: 660014 - DNA, 55 bp, Artificial; identical to SEQ ID NO: 291331
  Synthetic oligonucleotide

SEQ ID NO: 660015 - DNA, 55 bp, Artificial; identical to SEQ ID NO: 291336
  Synthetic oligonucleotide

SEQ ID NO: 660016 - DNA, 55 bp, Artificial; identical to SEQ ID NO: 291337
  Synthetic oligonucleotide

SEQ ID NO: 660017 - DNA, 58 bp, Artificial; identical to SEQ ID NO: 289249
  Synthetic oligonucleotide

SEQ ID NO: 660018 - DNA, 55 bp, Artificial; identical to SEQ ID NO: 291340
  Synthetic oligonucleotide

SEQ ID NO: 660019 - DNA, 55 bp, Artificial; identical to SEQ ID NO: 291322
  Synthetic oligonucleotide

SEQ ID NO: 660020 - DNA, 52 bp, Artificial; identical to SEQ ID NO: 294032
  Synthetic oligonucleotide

SEQ ID NO: 660021 - DNA, 54 bp, Artificial; identical to SEQ ID NO: 291314
  Synthetic oligonucleotide

SEQ ID NO: 660022 - DNA, 55 bp, Artificial; identical to SEQ ID NO: 291313
  Synthetic oligonucleotide

SEQ ID NO: 660023 - DNA, 55 bp, Artificial; identical to SEQ ID NO: 291307
  Synthetic oligonucleotide

SEQ ID NO: 660024 - DNA, 54 bp, Artificial; identical to SEQ ID NO: 293102
  Synthetic oligonucleotide

SEQ ID NO: 660025 - DNA, 55 bp, Artificial; identical to SEQ ID NO: 291359
  Synthetic oligonucleotide

SEQ ID NO: 660026 - DNA, 60 bp, Artificial; identical to SEQ ID NO: 290127
  Synthetic oligonucleotide

SEQ ID NO: 660027 - DNA, 55 bp, Artificial; identical to SEQ ID NO: 291364
  Synthetic oligonucleotide

SEQ ID NO: 660028 - DNA, 55 bp, Artificial; identical to SEQ ID NO: 291365
  Synthetic oligonucleotide

SEQ ID NO: 660029 - DNA, 55 bp, Artificial; identical to SEQ ID NO: 291366
  Synthetic oligonucleotide

SEQ ID NO: 660030 - DNA, 55 bp, Artificial; identical to SEQ ID NO: 291373
  Synthetic oligonucleotide

SEQ ID NO: 660031 - DNA, 55 bp, Artificial; identical to SEQ ID NO: 291375
  Synthetic oligonucleotide

SEQ ID NO: 660032 - DNA, 51 bp, Artificial; identical to SEQ ID NO: 294570
  Synthetic oligonucleotide

SEQ ID NO: 660033 - DNA, 51 bp, Artificial; identical to SEQ ID NO: 291356
  Synthetic oligonucleotide

SEQ ID NO: 660034 - DNA, 55 bp, Artificial; identical to SEQ ID NO: 291355
  Synthetic oligonucleotide

SEQ ID NO: 660035 - DNA, 55 bp, Artificial; identical to SEQ ID NO: 291354
  Synthetic oligonucleotide

SEQ ID NO: 660036 - DNA, 55 bp, Artificial; identical to SEQ ID NO: 291350
  Synthetic oligonucleotide

SEQ ID NO: 660037 - DNA, 55 bp, Artificial; identical to SEQ ID NO: 291345
  Synthetic oligonucleotide

SEQ ID NO: 660038 - DNA, 55 bp, Artificial; identical to SEQ ID NO: 290971
  Synthetic oligonucleotide

SEQ ID NO: 660039 - DNA, 55 bp, Artificial; identical to SEQ ID NO: 290978
  Synthetic oligonucleotide

SEQ ID NO: 660040 - DNA, 55 bp, Artificial; identical to SEQ ID NO: 290979
  Synthetic oligonucleotide

SEQ ID NO: 660041 - DNA, 54 bp, Artificial; identical to SEQ ID NO: 293020
  Synthetic oligonucleotide

SEQ ID NO: 660042 - DNA, 55 bp, Artificial; identical to SEQ ID NO: 290982
  Synthetic oligonucleotide

SEQ ID NO: 660043 - DNA, 55 bp, Artificial; identical to SEQ ID NO: 290984
  Synthetic oligonucleotide

SEQ ID NO: 660044 - DNA, 55 bp, Artificial; identical to SEQ ID NO: 290988
  Synthetic oligonucleotide

SEQ ID NO: 660045 - DNA, 52 bp, Artificial; identical to SEQ ID NO: 294048
  Synthetic oligonucleotide

SEQ ID NO: 660046 - DNA, 55 bp, Artificial; identical to SEQ ID NO: 290968
  Synthetic oligonucleotide

SEQ ID NO: 660047 - DNA, 55 bp, Artificial; identical to SEQ ID NO: 290966
  Synthetic oligonucleotide

SEQ ID NO: 660048 - DNA, 55 bp, Artificial; identical to SEQ ID NO: 290965
  Synthetic oligonucleotide

SEQ ID NO: 660049 - DNA, 55 bp, Artificial; identical to SEQ ID NO: 290962
  Synthetic oligonucleotide

SEQ ID NO: 660050 - DNA, 55 bp, Artificial; identical to SEQ ID NO: 290959
  Synthetic oligonucleotide

SEQ ID NO: 660051 - DNA, 55 bp, Artificial; identical to SEQ ID NO: 290956
  Synthetic oligonucleotide

SEQ ID NO: 660052 - DNA, 55 bp, Artificial; identical to SEQ ID NO: 290955
  Synthetic oligonucleotide

SEQ ID NO: 660053 - DNA, 55 bp, Artificial; identical to SEQ ID NO: 290954
  Synthetic oligonucleotide

SEQ ID NO: 660054 - DNA, 53 bp, Artificial; identical to SEQ ID NO: 290953
  Synthetic oligonucleotide

SEQ ID NO: 660055 - DNA, 55 bp, Artificial; identical to SEQ ID NO: 291007
  Synthetic oligonucleotide

SEQ ID NO: 660056 - DNA, 55 bp, Artificial; identical to SEQ ID NO: 291008
  Synthetic oligonucleotide

SEQ ID NO: 660057 - DNA, 55 bp, Artificial; identical to SEQ ID NO: 291009
  Synthetic oligonucleotide

SEQ ID NO: 660058 - DNA, 55 bp, Artificial; identical to SEQ ID NO: 291014
  Synthetic oligonucleotide

SEQ ID NO: 660059 - DNA, 55 bp, Artificial; identical to SEQ ID NO: 291015
  Synthetic oligonucleotide

SEQ ID NO: 660060 - DNA, 55 bp, Artificial; identical to SEQ ID NO: 291017
  Synthetic oligonucleotide

SEQ ID NO: 660061 - DNA, 55 bp, Artificial; identical to SEQ ID NO: 291019
  Synthetic oligonucleotide

SEQ ID NO: 660062 - DNA, 55 bp, Artificial; identical to SEQ ID NO: 291021
  Synthetic oligonucleotide

SEQ ID NO: 660063 - DNA, 51 bp, Artificial; identical to SEQ ID NO: 294608
  Synthetic oligonucleotide

SEQ ID NO: 660064 - DNA, 55 bp, Artificial; identical to SEQ ID NO: 291023
  Synthetic oligonucleotide

SEQ ID NO: 660065 - DNA, 51 bp, Artificial; identical to SEQ ID NO: 294612
  Synthetic oligonucleotide

SEQ ID NO: 660066 - DNA, 55 bp, Artificial; identical to SEQ ID NO: 291002
  Synthetic oligonucleotide

SEQ ID NO: 660067 - DNA, 54 bp, Artificial; identical to SEQ ID NO: 291000
  Synthetic oligonucleotide

SEQ ID NO: 660068 - DNA, 55 bp, Artificial; identical to SEQ ID NO: 290998
  Synthetic oligonucleotide

SEQ ID NO: 660069 - DNA, 55 bp, Artificial; identical to SEQ ID NO: 290997
  Synthetic oligonucleotide

SEQ ID NO: 660070 - DNA, 54 bp, Artificial; identical to SEQ ID NO: 290996
  Synthetic oligonucleotide

SEQ ID NO: 660071 - DNA, 51 bp, Artificial; identical to SEQ ID NO: 294621
  Synthetic oligonucleotide

SEQ ID NO: 660072 - DNA, 50 bp, Artificial; identical to SEQ ID NO: 287019
  Synthetic oligonucleotide

SEQ ID NO: 660073 - DNA, 52 bp, Artificial; identical to SEQ ID NO: 293086
  Synthetic oligonucleotide

SEQ ID NO: 660074 - DNA, 55 bp, Artificial; identical to SEQ ID NO: 290993
  Synthetic oligonucleotide

SEQ ID NO: 660075 - DNA, 53 bp, Artificial; identical to SEQ ID NO: 293553
  Synthetic oligonucleotide

SEQ ID NO: 660076 - DNA, 55 bp, Artificial; identical to SEQ ID NO: 290990
  Synthetic oligonucleotide

SEQ ID NO: 660077 - DNA, 51 bp, Artificial; identical to SEQ ID NO: 294619
  Synthetic oligonucleotide

SEQ ID NO: 660078 - DNA, 54 bp, Artificial; identical to SEQ ID NO: 290911
  Synthetic oligonucleotide

SEQ ID NO: 660079 - DNA, 55 bp, Artificial; identical to SEQ ID NO: 290909
  Synthetic oligonucleotide

SEQ ID NO: 660080 - DNA, 55 bp, Artificial; identical to SEQ ID NO: 290904
  Synthetic oligonucleotide

SEQ ID NO: 660081 - DNA, 55 bp, Artificial; identical to SEQ ID NO: 290903
  Synthetic oligonucleotide

SEQ ID NO: 660082 - DNA, 55 bp, Artificial; identical to SEQ ID NO: 290901
  Synthetic oligonucleotide

SEQ ID NO: 660083 - DNA, 55 bp, Artificial; identical to SEQ ID NO: 290072
  Synthetic oligonucleotide

SEQ ID NO: 660084 - DNA, 55 bp, Artificial; identical to SEQ ID NO: 290896
  Synthetic oligonucleotide

SEQ ID NO: 660085 - DNA, 55 bp, Artificial; identical to SEQ ID NO: 290895
  Synthetic oligonucleotide

SEQ ID NO: 660086 - DNA, 55 bp, Artificial; identical to SEQ ID NO: 290893
  Synthetic oligonucleotide

SEQ ID NO: 660087 - DNA, 50 bp, Artificial; identical to SEQ ID NO: 287305
  Synthetic oligonucleotide

SEQ ID NO: 660088 - DNA, 55 bp, Artificial; identical to SEQ ID NO: 290892
  Synthetic oligonucleotide

SEQ ID NO: 660089 - DNA, 48 bp, Artificial; identical to SEQ ID NO: 290888
  Synthetic oligonucleotide

SEQ ID NO: 660090 - DNA, 55 bp, Artificial; identical to SEQ ID NO: 290887
  Synthetic oligonucleotide

SEQ ID NO: 660091 - DNA, 55 bp, Artificial; identical to SEQ ID NO: 290886
  Synthetic oligonucleotide

SEQ ID NO: 660092 - DNA, 55 bp, Artificial; identical to SEQ ID NO: 290885
  Synthetic oligonucleotide

SEQ ID NO: 660093 - DNA, 57 bp, Artificial; identical to SEQ ID NO: 289983
  Synthetic oligonucleotide

SEQ ID NO: 660094 - DNA, 55 bp, Artificial; identical to SEQ ID NO: 290882
  Synthetic oligonucleotide

SEQ ID NO: 660095 - DNA, 55 bp, Artificial; identical to SEQ ID NO: 290881
  Synthetic oligonucleotide

SEQ ID NO: 660096 - DNA, 55 bp, Artificial; identical to SEQ ID NO: 290933
  Synthetic oligonucleotide

SEQ ID NO: 660097 - DNA, 52 bp, Artificial; identical to SEQ ID NO: 294119
  Synthetic oligonucleotide

SEQ ID NO: 660098 - DNA, 53 bp, Artificial; identical to SEQ ID NO: 293575
  Synthetic oligonucleotide

SEQ ID NO: 660099 - DNA, 55 bp, Artificial; identical to SEQ ID NO: 290939
  Synthetic oligonucleotide

SEQ ID NO: 660100 - DNA, 55 bp, Artificial; identical to SEQ ID NO: 290940
  Synthetic oligonucleotide

SEQ ID NO: 660101 - DNA, 55 bp, Artificial; identical to SEQ ID NO: 290941
  Synthetic oligonucleotide

SEQ ID NO: 660102 - DNA, 52 bp, Artificial; identical to SEQ ID NO: 290943
  Synthetic oligonucleotide

SEQ ID NO: 660103 - DNA, 55 bp, Artificial; identical to SEQ ID NO: 290944
  Synthetic oligonucleotide

SEQ ID NO: 660104 - DNA, 55 bp, Artificial; identical to SEQ ID NO: 290947
  Synthetic oligonucleotide

SEQ ID NO: 660105 - DNA, 55 bp, Artificial; identical to SEQ ID NO: 290948
  Synthetic oligonucleotide

SEQ ID NO: 660106 - DNA, 55 bp, Artificial; identical to SEQ ID NO: 290932
  Synthetic oligonucleotide

SEQ ID NO: 660107 - DNA, 57 bp, Artificial; identical to SEQ ID NO: 289905
  Synthetic oligonucleotide

SEQ ID NO: 660108 - DNA, 57 bp, Artificial; identical to SEQ ID NO: 289894
  Synthetic oligonucleotide

SEQ ID NO: 660109 - DNA, 60 bp, Artificial; identical to SEQ ID NO: 289883
  Synthetic oligonucleotide

SEQ ID NO: 660110 - DNA, 55 bp, Artificial; identical to SEQ ID NO: 290929
  Synthetic oligonucleotide

SEQ ID NO: 660111 - DNA, 54 bp, Artificial; identical to SEQ ID NO: 290928
  Synthetic oligonucleotide

SEQ ID NO: 660112 - DNA, 55 bp, Artificial; identical to SEQ ID NO: 290926
  Synthetic oligonucleotide

SEQ ID NO: 660113 - DNA, 55 bp, Artificial; identical to SEQ ID NO: 290925
  Synthetic oligonucleotide

SEQ ID NO: 660114 - DNA, 58 bp, Artificial; identical to SEQ ID NO: 289816
  Synthetic oligonucleotide

SEQ ID NO: 660115 - DNA, 55 bp, Artificial; identical to SEQ ID NO: 290924
  Synthetic oligonucleotide

SEQ ID NO: 660116 - DNA, 57 bp, Artificial; identical to SEQ ID NO: 296782
  Synthetic oligonucleotide

SEQ ID NO: 660117 - DNA, 55 bp, Artificial; identical to SEQ ID NO: 290923
  Synthetic oligonucleotide

SEQ ID NO: 660118 - DNA, 55 bp, Artificial; identical to SEQ ID NO: 289772
  Synthetic oligonucleotide

SEQ ID NO: 660119 - DNA, 55 bp, Artificial; identical to SEQ ID NO: 290920
  Synthetic oligonucleotide

SEQ ID NO: 660120 - DNA, 55 bp, Artificial; identical to SEQ ID NO: 290918
  Synthetic oligonucleotide

SEQ ID NO: 660121 - DNA, 57 bp, Artificial; identical to SEQ ID NO: 296904
  Synthetic oligonucleotide

SEQ ID NO: 660122 - DNA, 55 bp, Artificial; identical to SEQ ID NO: 290917
  Synthetic oligonucleotide

SEQ ID NO: 660123 - DNA, 55 bp, Artificial; identical to SEQ ID NO: 290915
  Synthetic oligonucleotide

SEQ ID NO: 660124 - DNA, 53 bp, Artificial; identical to SEQ ID NO: 291114
  Synthetic oligonucleotide

SEQ ID NO: 660125 - DNA, 57 bp, Artificial; identical to SEQ ID NO: 290316
  Synthetic oligonucleotide

SEQ ID NO: 660126 - DNA, 58 bp, Artificial; identical to SEQ ID NO: 290327
  Synthetic oligonucleotide

SEQ ID NO: 660127 - DNA, 55 bp, Artificial; identical to SEQ ID NO: 291117
  Synthetic oligonucleotide

SEQ ID NO: 660128 - DNA, 55 bp, Artificial; identical to SEQ ID NO: 291119
  Synthetic oligonucleotide

SEQ ID NO: 660129 - DNA, 54 bp, Artificial; identical to SEQ ID NO: 293002
  Synthetic oligonucleotide

SEQ ID NO: 660130 - DNA, 55 bp, Artificial; identical to SEQ ID NO: 291120
  Synthetic oligonucleotide

SEQ ID NO: 660131 - DNA, 58 bp, Artificial; identical to SEQ ID NO: 290371
  Synthetic oligonucleotide

SEQ ID NO: 660132 - DNA, 55 bp, Artificial; identical to SEQ ID NO: 291121
  Synthetic oligonucleotide

SEQ ID NO: 660133 - DNA, 60 bp, Artificial; identical to SEQ ID NO: 290382
  Synthetic oligonucleotide

SEQ ID NO: 660134 - DNA, 55 bp, Artificial; identical to SEQ ID NO: 291123
  Synthetic oligonucleotide

SEQ ID NO: 660135 - DNA, 56 bp, Artificial; identical to SEQ ID NO: 287104
  Synthetic oligonucleotide

SEQ ID NO: 660136 - DNA, 55 bp, Artificial; identical to SEQ ID NO: 291128
  Synthetic oligonucleotide

SEQ ID NO: 660137 - DNA, 51 bp, Artificial; identical to SEQ ID NO: 294584
  Synthetic oligonucleotide

SEQ ID NO: 660138 - DNA, 55 bp, Artificial; identical to SEQ ID NO: 291131
  Synthetic oligonucleotide

SEQ ID NO: 660139 - DNA, 51 bp, Artificial; identical to SEQ ID NO: 291111
  Synthetic oligonucleotide

SEQ ID NO: 660140 - DNA, 55 bp, Artificial; identical to SEQ ID NO: 291110
  Synthetic oligonucleotide

SEQ ID NO: 660141 - DNA, 55 bp, Artificial; identical to SEQ ID NO: 291108
  Synthetic oligonucleotide

SEQ ID NO: 660142 - DNA, 50 bp, Artificial; identical to SEQ ID NO: 291107
  Synthetic oligonucleotide

SEQ ID NO: 660143 - DNA, 55 bp, Artificial; identical to SEQ ID NO: 291102
  Synthetic oligonucleotide

SEQ ID NO: 660144 - DNA, 55 bp, Artificial; identical to SEQ ID NO: 291101
  Synthetic oligonucleotide

SEQ ID NO: 660145 - DNA, 55 bp, Artificial; identical to SEQ ID NO: 291096
  Synthetic oligonucleotide

SEQ ID NO: 660146 - DNA, 55 bp, Artificial; identical to SEQ ID NO: 291150
  Synthetic oligonucleotide

SEQ ID NO: 660147 - DNA, 55 bp, Artificial; identical to SEQ ID NO: 291151
  Synthetic oligonucleotide

SEQ ID NO: 660148 - DNA, 54 bp, Artificial; identical to SEQ ID NO: 291155
  Synthetic oligonucleotide

SEQ ID NO: 660149 - DNA, 55 bp, Artificial; identical to SEQ ID NO: 291157
  Synthetic oligonucleotide

SEQ ID NO: 660150 - DNA, 55 bp, Artificial; identical to SEQ ID NO: 291158
  Synthetic oligonucleotide

SEQ ID NO: 660151 - DNA, 60 bp, Artificial; identical to SEQ ID NO: 290249
  Synthetic oligonucleotide

SEQ ID NO: 660152 - DNA, 53 bp, Artificial; identical to SEQ ID NO: 293461
  Synthetic oligonucleotide

SEQ ID NO: 660153 - DNA, 55 bp, Artificial; identical to SEQ ID NO: 291159
  Synthetic oligonucleotide

SEQ ID NO: 660154 - DNA, 55 bp, Artificial; identical to SEQ ID NO: 291162
  Synthetic oligonucleotide

SEQ ID NO: 660155 - DNA, 51 bp, Artificial; identical to SEQ ID NO: 294712
  Synthetic oligonucleotide

SEQ ID NO: 660156 - DNA, 55 bp, Artificial; identical to SEQ ID NO: 291164
  Synthetic oligonucleotide

SEQ ID NO: 660157 - DNA, 55 bp, Artificial; identical to SEQ ID NO: 291165
  Synthetic oligonucleotide

SEQ ID NO: 660158 - DNA, 55 bp, Artificial; identical to SEQ ID NO: 291166
  Synthetic oligonucleotide

SEQ ID NO: 660159 - DNA, 55 bp, Artificial; identical to SEQ ID NO: 291167
  Synthetic oligonucleotide

SEQ ID NO: 660160 - DNA, 52 bp, Artificial; identical to SEQ ID NO: 294097
  Synthetic oligonucleotide

SEQ ID NO: 660161 - DNA, 55 bp, Artificial; identical to SEQ ID NO: 291145
  Synthetic oligonucleotide

SEQ ID NO: 660162 - DNA, 57 bp, Artificial; identical to SEQ ID NO: 290205
  Synthetic oligonucleotide

SEQ ID NO: 660163 - DNA, 55 bp, Artificial; identical to SEQ ID NO: 291142
  Synthetic oligonucleotide

SEQ ID NO: 660164 - DNA, 54 bp, Artificial; identical to SEQ ID NO: 292980
  Synthetic oligonucleotide

SEQ ID NO: 660165 - DNA, 55 bp, Artificial; identical to SEQ ID NO: 291136
  Synthetic oligonucleotide

SEQ ID NO: 660166 - DNA, 55 bp, Artificial; identical to SEQ ID NO: 291135
  Synthetic oligonucleotide

SEQ ID NO: 660167 - DNA, 55 bp, Artificial; identical to SEQ ID NO: 291058
  Synthetic oligonucleotide

SEQ ID NO: 660168 - DNA, 55 bp, Artificial; identical to SEQ ID NO: 291053
  Synthetic oligonucleotide

SEQ ID NO: 660169 - DNA, 51 bp, Artificial; identical to SEQ ID NO: 294734
  Synthetic oligonucleotide

SEQ ID NO: 660170 - DNA, 55 bp, Artificial; identical to SEQ ID NO: 291050
  Synthetic oligonucleotide

SEQ ID NO: 660171 - DNA, 55 bp, Artificial; identical to SEQ ID NO: 291048
  Synthetic oligonucleotide

SEQ ID NO: 660172 - DNA, 55 bp, Artificial; identical to SEQ ID NO: 291047
  Synthetic oligonucleotide

SEQ ID NO: 660173 - DNA, 55 bp, Artificial; identical to SEQ ID NO: 291043
  Synthetic oligonucleotide

SEQ ID NO: 660174 - DNA, 55 bp, Artificial; identical to SEQ ID NO: 291042
  Synthetic oligonucleotide

SEQ ID NO: 660175 - DNA, 50 bp, Artificial; identical to SEQ ID NO: 287260
  Synthetic oligonucleotide

SEQ ID NO: 660176 - DNA, 55 bp, Artificial; identical to SEQ ID NO: 291041
  Synthetic oligonucleotide

SEQ ID NO: 660177 - DNA, 53 bp, Artificial; identical to SEQ ID NO: 293881
  Synthetic oligonucleotide

SEQ ID NO: 660178 - DNA, 55 bp, Artificial; identical to SEQ ID NO: 291036
  Synthetic oligonucleotide

SEQ ID NO: 660179 - DNA, 55 bp, Artificial; identical to SEQ ID NO: 291034
  Synthetic oligonucleotide

SEQ ID NO: 660180 - DNA, 55 bp, Artificial; identical to SEQ ID NO: 291031
  Synthetic oligonucleotide

SEQ ID NO: 660181 - DNA, 55 bp, Artificial; identical to SEQ ID NO: 291028
  Synthetic oligonucleotide

SEQ ID NO: 660182 - DNA, 55 bp, Artificial; identical to SEQ ID NO: 291025
  Synthetic oligonucleotide

SEQ ID NO: 660183 - DNA, 53 bp, Artificial; identical to SEQ ID NO: 293918
  Synthetic oligonucleotide

SEQ ID NO: 660184 - DNA, 60 bp, Artificial; identical to SEQ ID NO: 289327
  Synthetic oligonucleotide

SEQ ID NO: 660185 - DNA, 55 bp, Artificial; identical to SEQ ID NO: 291077
  Synthetic oligonucleotide

SEQ ID NO: 660186 - DNA, 55 bp, Artificial; identical to SEQ ID NO: 291079
  Synthetic oligonucleotide

SEQ ID NO: 660187 - DNA, 55 bp, Artificial; identical to SEQ ID NO: 289305
  Synthetic oligonucleotide

SEQ ID NO: 660188 - DNA, 55 bp, Artificial; identical to SEQ ID NO: 291080
  Synthetic oligonucleotide

SEQ ID NO: 660189 - DNA, 48 bp, Artificial; identical to SEQ ID NO: 291081
  Synthetic oligonucleotide

SEQ ID NO: 660190 - DNA, 55 bp, Artificial; identical to SEQ ID NO: 291082
  Synthetic oligonucleotide

SEQ ID NO: 660191 - DNA, 49 bp, Artificial; identical to SEQ ID NO: 291084
  Synthetic oligonucleotide

SEQ ID NO: 660192 - DNA, 44 bp, Artificial; identical to SEQ ID NO: 291085
  Synthetic oligonucleotide

SEQ ID NO: 660193 - DNA, 55 bp, Artificial; identical to SEQ ID NO: 291086
  Synthetic oligonucleotide

SEQ ID NO: 660194 - DNA, 55 bp, Artificial; identical to SEQ ID NO: 291087
  Synthetic oligonucleotide

SEQ ID NO: 660195 - DNA, 54 bp, Artificial; identical to SEQ ID NO: 291088
  Synthetic oligonucleotide

SEQ ID NO: 660196 - DNA, 55 bp, Artificial; identical to SEQ ID NO: 291089
  Synthetic oligonucleotide

SEQ ID NO: 660197 - DNA, 60 bp, Artificial; identical to SEQ ID NO: 289216
  Synthetic oligonucleotide

SEQ ID NO: 660198 - DNA, 56 bp, Artificial; identical to SEQ ID NO: 289205
  Synthetic oligonucleotide

SEQ ID NO: 660199 - DNA, 55 bp, Artificial; identical to SEQ ID NO: 291091
  Synthetic oligonucleotide

SEQ ID NO: 660200 - DNA, 55 bp, Artificial; identical to SEQ ID NO: 291092
  Synthetic oligonucleotide

SEQ ID NO: 660201 - DNA, 53 bp, Artificial; identical to SEQ ID NO: 293801
  Synthetic oligonucleotide

SEQ ID NO: 660202 - DNA, 55 bp, Artificial; identical to SEQ ID NO: 291093
  Synthetic oligonucleotide

SEQ ID NO: 660203 - DNA, 55 bp, Artificial; identical to SEQ ID NO: 291095
  Synthetic oligonucleotide

SEQ ID NO: 660204 - DNA, 55 bp, Artificial; identical to SEQ ID NO: 291076
  Synthetic oligonucleotide

SEQ ID NO: 660205 - DNA, 57 bp, Artificial; identical to SEQ ID NO: 296449
  Synthetic oligonucleotide

SEQ ID NO: 660206 - DNA, 55 bp, Artificial; identical to SEQ ID NO: 291074
  Synthetic oligonucleotide

SEQ ID NO: 660207 - DNA, 55 bp, Artificial; identical to SEQ ID NO: 291073
  Synthetic oligonucleotide

SEQ ID NO: 660208 - DNA, 55 bp, Artificial; identical to SEQ ID NO: 291070
  Synthetic oligonucleotide

SEQ ID NO: 660209 - DNA, 53 bp, Artificial; identical to SEQ ID NO: 293791
  Synthetic oligonucleotide

SEQ ID NO: 660210 - DNA, 55 bp, Artificial; identical to SEQ ID NO: 291067
  Synthetic oligonucleotide

SEQ ID NO: 660211 - DNA, 54 bp, Artificial; identical to SEQ ID NO: 291065
  Synthetic oligonucleotide

SEQ ID NO: 660212 - DNA, 55 bp, Artificial; identical to SEQ ID NO: 291063
  Synthetic oligonucleotide

SEQ ID NO: 660213 - DNA, 55 bp, Artificial; identical to SEQ ID NO: 291062
  Synthetic oligonucleotide

SEQ ID NO: 660214 - DNA, 54 bp, Artificial; identical to SEQ ID NO: 289060
  Synthetic oligonucleotide

SEQ ID NO: 660215 - DNA, 55 bp, Artificial; identical to SEQ ID NO: 291061
  Synthetic oligonucleotide

SEQ ID NO: 660216 - DNA, 54 bp, Artificial; identical to SEQ ID NO: 294871
  Synthetic oligonucleotide

SEQ ID NO: 660217 - DNA, 53 bp, Artificial; identical to SEQ ID NO: 289545
  Synthetic oligonucleotide

SEQ ID NO: 660218 - DNA, 55 bp, Artificial; identical to SEQ ID NO: 289546
  Synthetic oligonucleotide

SEQ ID NO: 660219 - DNA, 57 bp, Artificial; identical to SEQ ID NO: 289572
  Synthetic oligonucleotide

SEQ ID NO: 660220 - DNA, 51 bp, Artificial; identical to SEQ ID NO: 294463
  Synthetic oligonucleotide

SEQ ID NO: 660221 - DNA, 58 bp, Artificial; identical to SEQ ID NO: 294216
  Synthetic oligonucleotide

SEQ ID NO: 660222 - DNA, 52 bp, Artificial; identical to SEQ ID NO: 294084
  Synthetic oligonucleotide

SEQ ID NO: 660223 - DNA, 55 bp, Artificial; identical to SEQ ID NO: 289549
  Synthetic oligonucleotide

SEQ ID NO: 660224 - DNA, 55 bp, Artificial; identical to SEQ ID NO: 289552
  Synthetic oligonucleotide

SEQ ID NO: 660225 - DNA, 55 bp, Artificial; identical to SEQ ID NO: 289554
  Synthetic oligonucleotide

SEQ ID NO: 660226 - DNA, 52 bp, Artificial; identical to SEQ ID NO: 294080
  Synthetic oligonucleotide

SEQ ID NO: 660227 - DNA, 55 bp, Artificial; identical to SEQ ID NO: 289555
  Synthetic oligonucleotide

SEQ ID NO: 660228 - DNA, 55 bp, Artificial; identical to SEQ ID NO: 289556
  Synthetic oligonucleotide

SEQ ID NO: 660229 - DNA, 55 bp, Artificial; identical to SEQ ID NO: 289557
  Synthetic oligonucleotide

SEQ ID NO: 660230 - DNA, 54 bp, Artificial; identical to SEQ ID NO: 293109
  Synthetic oligonucleotide

SEQ ID NO: 660231 - DNA, 54 bp, Artificial; identical to SEQ ID NO: 289558
  Synthetic oligonucleotide

SEQ ID NO: 660232 - DNA, 55 bp, Artificial; identical to SEQ ID NO: 289560
  Synthetic oligonucleotide

SEQ ID NO: 660233 - DNA, 55 bp, Artificial; identical to SEQ ID NO: 289544
  Synthetic oligonucleotide

SEQ ID NO: 660234 - DNA, 56 bp, Artificial; identical to SEQ ID NO: 297004
  Synthetic oligonucleotide

SEQ ID NO: 660235 - DNA, 52 bp, Artificial; identical to SEQ ID NO: 294078
  Synthetic oligonucleotide

SEQ ID NO: 660236 - DNA, 55 bp, Artificial; identical to SEQ ID NO: 289542
  Synthetic oligonucleotide

SEQ ID NO: 660237 - DNA, 51 bp, Artificial; identical to SEQ ID NO: 294536
  Synthetic oligonucleotide

SEQ ID NO: 660238 - DNA, 51 bp, Artificial; identical to SEQ ID NO: 294535
  Synthetic oligonucleotide

SEQ ID NO: 660239 - DNA, 52 bp, Artificial; identical to SEQ ID NO: 294125
  Synthetic oligonucleotide

SEQ ID NO: 660240 - DNA, 52 bp, Artificial; identical to SEQ ID NO: 289538
  Synthetic oligonucleotide

SEQ ID NO: 660241 - DNA, 55 bp, Artificial; identical to SEQ ID NO: 289536
  Synthetic oligonucleotide

SEQ ID NO: 660242 - DNA, 55 bp, Artificial; identical to SEQ ID NO: 289535
  Synthetic oligonucleotide

SEQ ID NO: 660243 - DNA, 55 bp, Artificial; identical to SEQ ID NO: 289534
  Synthetic oligonucleotide

SEQ ID NO: 660244 - DNA, 50 bp, Artificial; identical to SEQ ID NO: 286737
  Synthetic oligonucleotide

SEQ ID NO: 660245 - DNA, 55 bp, Artificial; identical to SEQ ID NO: 289533
  Synthetic oligonucleotide

SEQ ID NO: 660246 - DNA, 55 bp, Artificial; identical to SEQ ID NO: 289530
  Synthetic oligonucleotide

SEQ ID NO: 660247 - DNA, 55 bp, Artificial; identical to SEQ ID NO: 289527
  Synthetic oligonucleotide

SEQ ID NO: 660248 - DNA, 55 bp, Artificial; identical to SEQ ID NO: 289584
  Synthetic oligonucleotide

SEQ ID NO: 660249 - DNA, 53 bp, Artificial; identical to SEQ ID NO: 293872
  Synthetic oligonucleotide

SEQ ID NO: 660250 - DNA, 58 bp, Artificial; identical to SEQ ID NO: 289539
  Synthetic oligonucleotide

SEQ ID NO: 660251 - DNA, 51 bp, Artificial; identical to SEQ ID NO: 294468
  Synthetic oligonucleotide

SEQ ID NO: 660252 - DNA, 52 bp, Artificial; identical to SEQ ID NO: 294121
  Synthetic oligonucleotide

SEQ ID NO: 660253 - DNA, 55 bp, Artificial; identical to SEQ ID NO: 289592
  Synthetic oligonucleotide

SEQ ID NO: 660254 - DNA, 51 bp, Artificial; identical to SEQ ID NO: 294519
  Synthetic oligonucleotide

SEQ ID NO: 660255 - DNA, 54 bp, Artificial; identical to SEQ ID NO: 289471
  Synthetic oligonucleotide

SEQ ID NO: 660256 - DNA, 55 bp, Artificial; identical to SEQ ID NO: 289595
  Synthetic oligonucleotide

SEQ ID NO: 660257 - DNA, 54 bp, Artificial; identical to SEQ ID NO: 289438
  Synthetic oligonucleotide

SEQ ID NO: 660258 - DNA, 53 bp, Artificial; identical to SEQ ID NO: 293862
  Synthetic oligonucleotide

SEQ ID NO: 660259 - DNA, 55 bp, Artificial; identical to SEQ ID NO: 289598
  Synthetic oligonucleotide

SEQ ID NO: 660260 - DNA, 58 bp, Artificial; identical to SEQ ID NO: 294849
  Synthetic oligonucleotide

SEQ ID NO: 660261 - DNA, 55 bp, Artificial; identical to SEQ ID NO: 289580
  Synthetic oligonucleotide

SEQ ID NO: 660262 - DNA, 53 bp, Artificial; identical to SEQ ID NO: 289578
  Synthetic oligonucleotide

SEQ ID NO: 660263 - DNA, 52 bp, Artificial; identical to SEQ ID NO: 294118
  Synthetic oligonucleotide

SEQ ID NO: 660264 - DNA, 56 bp, Artificial; identical to SEQ ID NO: 287193
  Synthetic oligonucleotide

SEQ ID NO: 660265 - DNA, 52 bp, Artificial; identical to SEQ ID NO: 294115
  Synthetic oligonucleotide

SEQ ID NO: 660266 - DNA, 54 bp, Artificial; identical to SEQ ID NO: 293092
  Synthetic oligonucleotide

SEQ ID NO: 660267 - DNA, 55 bp, Artificial; identical to SEQ ID NO: 289575
  Synthetic oligonucleotide

SEQ ID NO: 660268 - DNA, 55 bp, Artificial; identical to SEQ ID NO: 289574
  Synthetic oligonucleotide

SEQ ID NO: 660269 - DNA, 55 bp, Artificial; identical to SEQ ID NO: 289573
  Synthetic oligonucleotide

SEQ ID NO: 660270 - DNA, 54 bp, Artificial; identical to SEQ ID NO: 293082
  Synthetic oligonucleotide

SEQ ID NO: 660271 - DNA, 58 bp, Artificial; identical to SEQ ID NO: 291516
  Synthetic oligonucleotide

SEQ ID NO: 660272 - DNA, 55 bp, Artificial; identical to SEQ ID NO: 289571
  Synthetic oligonucleotide

SEQ ID NO: 660273 - DNA, 57 bp, Artificial; identical to SEQ ID NO: 296826
  Synthetic oligonucleotide

SEQ ID NO: 660274 - DNA, 52 bp, Artificial; identical to SEQ ID NO: 294112
  Synthetic oligonucleotide

SEQ ID NO: 660275 - DNA, 59 bp, Artificial; identical to SEQ ID NO: 291504
  Synthetic oligonucleotide

SEQ ID NO: 660276 - DNA, 52 bp, Artificial; identical to SEQ ID NO: 294111
  Synthetic oligonucleotide

SEQ ID NO: 660277 - DNA, 55 bp, Artificial; identical to SEQ ID NO: 289570
  Synthetic oligonucleotide

SEQ ID NO: 660278 - DNA, 52 bp, Artificial; identical to SEQ ID NO: 294109
  Synthetic oligonucleotide

SEQ ID NO: 660279 - DNA, 55 bp, Artificial; identical to SEQ ID NO: 289568
  Synthetic oligonucleotide

SEQ ID NO: 660280 - DNA, 57 bp, Artificial; identical to SEQ ID NO: 291471
  Synthetic oligonucleotide

SEQ ID NO: 660281 - DNA, 57 bp, Artificial; identical to SEQ ID NO: 291460
  Synthetic oligonucleotide

SEQ ID NO: 660282 - DNA, 57 bp, Artificial; identical to SEQ ID NO: 294649
  Synthetic oligonucleotide

SEQ ID NO: 660283 - DNA, 55 bp, Artificial; identical to SEQ ID NO: 289567
  Synthetic oligonucleotide

SEQ ID NO: 660284 - DNA, 55 bp, Artificial; identical to SEQ ID NO: 289566
  Synthetic oligonucleotide

SEQ ID NO: 660285 - DNA, 55 bp, Artificial; identical to SEQ ID NO: 289565
  Synthetic oligonucleotide

SEQ ID NO: 660286 - DNA, 58 bp, Artificial; identical to SEQ ID NO: 295238
  Synthetic oligonucleotide

SEQ ID NO: 660287 - DNA, 55 bp, Artificial; identical to SEQ ID NO: 289487
  Synthetic oligonucleotide

SEQ ID NO: 660288 - DNA, 55 bp, Artificial; identical to SEQ ID NO: 289486
  Synthetic oligonucleotide

SEQ ID NO: 660289 - DNA, 55 bp, Artificial; identical to SEQ ID NO: 289485
  Synthetic oligonucleotide

SEQ ID NO: 660290 - DNA, 54 bp, Artificial; identical to SEQ ID NO: 293136
  Synthetic oligonucleotide

SEQ ID NO: 660291 - DNA, 55 bp, Artificial; identical to SEQ ID NO: 289483
  Synthetic oligonucleotide

SEQ ID NO: 660292 - DNA, 55 bp, Artificial; identical to SEQ ID NO: 289481
  Synthetic oligonucleotide

SEQ ID NO: 660293 - DNA, 55 bp, Artificial; identical to SEQ ID NO: 289480
  Synthetic oligonucleotide

SEQ ID NO: 660294 - DNA, 55 bp, Artificial; identical to SEQ ID NO: 289479
  Synthetic oligonucleotide

SEQ ID NO: 660295 - DNA, 54 bp, Artificial; identical to SEQ ID NO: 293151
  Synthetic oligonucleotide

SEQ ID NO: 660296 - DNA, 60 bp, Artificial; identical to SEQ ID NO: 291405
  Synthetic oligonucleotide

SEQ ID NO: 660297 - DNA, 55 bp, Artificial; identical to SEQ ID NO: 289478
  Synthetic oligonucleotide

SEQ ID NO: 660298 - DNA, 55 bp, Artificial; identical to SEQ ID NO: 289475
  Synthetic oligonucleotide

SEQ ID NO: 660299 - DNA, 60 bp, Artificial; identical to SEQ ID NO: 291371
  Synthetic oligonucleotide

SEQ ID NO: 660300 - DNA, 55 bp, Artificial; identical to SEQ ID NO: 289473
  Synthetic oligonucleotide

SEQ ID NO: 660301 - DNA, 55 bp, Artificial; identical to SEQ ID NO: 289470
  Synthetic oligonucleotide

SEQ ID NO: 660302 - DNA, 55 bp, Artificial; identical to SEQ ID NO: 289469
  Synthetic oligonucleotide

SEQ ID NO: 660303 - DNA, 55 bp, Artificial; identical to SEQ ID NO: 289467
  Synthetic oligonucleotide

SEQ ID NO: 660304 - DNA, 55 bp, Artificial; identical to SEQ ID NO: 289465
  Synthetic oligonucleotide

SEQ ID NO: 660305 - DNA, 55 bp, Artificial; identical to SEQ ID NO: 289463
  Synthetic oligonucleotide

SEQ ID NO: 660306 - DNA, 55 bp, Artificial; identical to SEQ ID NO: 291349
  Synthetic oligonucleotide

SEQ ID NO: 660307 - DNA, 55 bp, Artificial; identical to SEQ ID NO: 289459
  Synthetic oligonucleotide

SEQ ID NO: 660308 - DNA, 55 bp, Artificial; identical to SEQ ID NO: 289458
  Synthetic oligonucleotide

SEQ ID NO: 660309 - DNA, 55 bp, Artificial; identical to SEQ ID NO: 289457
  Synthetic oligonucleotide

SEQ ID NO: 660310 - DNA, 55 bp, Artificial; identical to SEQ ID NO: 289455
  Synthetic oligonucleotide

SEQ ID NO: 660311 - DNA, 55 bp, Artificial; identical to SEQ ID NO: 289507
  Synthetic oligonucleotide

SEQ ID NO: 660312 - DNA, 55 bp, Artificial; identical to SEQ ID NO: 289509
  Synthetic oligonucleotide

SEQ ID NO: 660313 - DNA, 52 bp, Artificial; identical to SEQ ID NO: 294103
  Synthetic oligonucleotide

SEQ ID NO: 660314 - DNA, 54 bp, Artificial; identical to SEQ ID NO: 292985
  Synthetic oligonucleotide

SEQ ID NO: 660315 - DNA, 55 bp, Artificial; identical to SEQ ID NO: 289510
  Synthetic oligonucleotide

SEQ ID NO: 660316 - DNA, 55 bp, Artificial; identical to SEQ ID NO: 289511
  Synthetic oligonucleotide

SEQ ID NO: 660317 - DNA, 55 bp, Artificial; identical to SEQ ID NO: 289518
  Synthetic oligonucleotide

SEQ ID NO: 660318 - DNA, 55 bp, Artificial; identical to SEQ ID NO: 289521
  Synthetic oligonucleotide

SEQ ID NO: 660319 - DNA, 55 bp, Artificial; identical to SEQ ID NO: 289523
  Synthetic oligonucleotide

SEQ ID NO: 660320 - DNA, 50 bp, Artificial; identical to SEQ ID NO: 297285
  Synthetic oligonucleotide

SEQ ID NO: 660321 - DNA, 55 bp, Artificial; identical to SEQ ID NO: 289525
  Synthetic oligonucleotide

SEQ ID NO: 660322 - DNA, 56 bp, Artificial; identical to SEQ ID NO: 286838
  Synthetic oligonucleotide

SEQ ID NO: 660323 - DNA, 55 bp, Artificial; identical to SEQ ID NO: 289526
  Synthetic oligonucleotide

SEQ ID NO: 660324 - DNA, 55 bp, Artificial; identical to SEQ ID NO: 289506
  Synthetic oligonucleotide

SEQ ID NO: 660325 - DNA, 55 bp, Artificial; identical to SEQ ID NO: 289503
  Synthetic oligonucleotide

SEQ ID NO: 660326 - DNA, 55 bp, Artificial; identical to SEQ ID NO: 289500
  Synthetic oligonucleotide

SEQ ID NO: 660327 - DNA, 53 bp, Artificial; identical to SEQ ID NO: 293836
  Synthetic oligonucleotide

SEQ ID NO: 660328 - DNA, 55 bp, Artificial; identical to SEQ ID NO: 289497
  Synthetic oligonucleotide

SEQ ID NO: 660329 - DNA, 55 bp, Artificial; identical to SEQ ID NO: 289496
  Synthetic oligonucleotide

SEQ ID NO: 660330 - DNA, 50 bp, Artificial; identical to SEQ ID NO: 286880
  Synthetic oligonucleotide

SEQ ID NO: 660331 - DNA, 55 bp, Artificial; identical to SEQ ID NO: 289494
  Synthetic oligonucleotide

SEQ ID NO: 660332 - DNA, 55 bp, Artificial; identical to SEQ ID NO: 289491
  Synthetic oligonucleotide

SEQ ID NO: 660333 - DNA, 55 bp, Artificial; identical to SEQ ID NO: 289490
  Synthetic oligonucleotide

SEQ ID NO: 660334 - DNA, 54 bp, Artificial; identical to SEQ ID NO: 295282
  Synthetic oligonucleotide

SEQ ID NO: 660335 - DNA, 52 bp, Artificial; identical to SEQ ID NO: 294045
  Synthetic oligonucleotide

SEQ ID NO: 660336 - DNA, 55 bp, Artificial; identical to SEQ ID NO: 289690
  Synthetic oligonucleotide

SEQ ID NO: 660337 - DNA, 55 bp, Artificial; identical to SEQ ID NO: 289693
  Synthetic oligonucleotide

SEQ ID NO: 660338 - DNA, 55 bp, Artificial; identical to SEQ ID NO: 289697
  Synthetic oligonucleotide

SEQ ID NO: 660339 - DNA, 55 bp, Artificial; identical to SEQ ID NO: 289699
  Synthetic oligonucleotide

SEQ ID NO: 660340 - DNA, 55 bp, Artificial; identical to SEQ ID NO: 289700
  Synthetic oligonucleotide

SEQ ID NO: 660341 - DNA, 52 bp, Artificial; identical to SEQ ID NO: 294043
  Synthetic oligonucleotide

SEQ ID NO: 660342 - DNA, 55 bp, Artificial; identical to SEQ ID NO: 289703
  Synthetic oligonucleotide

SEQ ID NO: 660343 - DNA, 56 bp, Artificial; identical to SEQ ID NO: 291816
  Synthetic oligonucleotide

SEQ ID NO: 660344 - DNA, 55 bp, Artificial; identical to SEQ ID NO: 289687
  Synthetic oligonucleotide

SEQ ID NO: 660345 - DNA, 55 bp, Artificial; identical to SEQ ID NO: 289686
  Synthetic oligonucleotide

SEQ ID NO: 660346 - DNA, 55 bp, Artificial; identical to SEQ ID NO: 289684
  Synthetic oligonucleotide

SEQ ID NO: 660347 - DNA, 55 bp, Artificial; identical to SEQ ID NO: 289682
  Synthetic oligonucleotide

SEQ ID NO: 660348 - DNA, 54 bp, Artificial; identical to SEQ ID NO: 291883
  Synthetic oligonucleotide

SEQ ID NO: 660349 - DNA, 53 bp, Artificial; identical to SEQ ID NO: 291682
  Synthetic oligonucleotide

SEQ ID NO: 660350 - DNA, 55 bp, Artificial; identical to SEQ ID NO: 289678
  Synthetic oligonucleotide

SEQ ID NO: 660351 - DNA, 55 bp, Artificial; identical to SEQ ID NO: 289677
  Synthetic oligonucleotide

SEQ ID NO: 660352 - DNA, 53 bp, Artificial; identical to SEQ ID NO: 293810
  Synthetic oligonucleotide

SEQ ID NO: 660353 - DNA, 58 bp, Artificial; identical to SEQ ID NO: 291638
  Synthetic oligonucleotide

SEQ ID NO: 660354 - DNA, 50 bp, Artificial; identical to SEQ ID NO: 286929
  Synthetic oligonucleotide

SEQ ID NO: 660355 - DNA, 55 bp, Artificial; identical to SEQ ID NO: 289674
  Synthetic oligonucleotide

SEQ ID NO: 660356 - DNA, 55 bp, Artificial; identical to SEQ ID NO: 289671
  Synthetic oligonucleotide

SEQ ID NO: 660357 - DNA, 55 bp, Artificial; identical to SEQ ID NO: 289722
  Synthetic oligonucleotide

SEQ ID NO: 660358 - DNA, 51 bp, Artificial; identical to SEQ ID NO: 294875
  Synthetic oligonucleotide

SEQ ID NO: 660359 - DNA, 55 bp, Artificial; identical to SEQ ID NO: 289725
  Synthetic oligonucleotide

SEQ ID NO: 660360 - DNA, 55 bp, Artificial; identical to SEQ ID NO: 289728
  Synthetic oligonucleotide

SEQ ID NO: 660361 - DNA, 52 bp, Artificial; identical to SEQ ID NO: 294039
  Synthetic oligonucleotide

SEQ ID NO: 660362 - DNA, 55 bp, Artificial; identical to SEQ ID NO: 289732
  Synthetic oligonucleotide

SEQ ID NO: 660363 - DNA, 54 bp, Artificial; identical to SEQ ID NO: 293121
  Synthetic oligonucleotide

SEQ ID NO: 660364 - DNA, 54 bp, Artificial; identical to SEQ ID NO: 293119
  Synthetic oligonucleotide

SEQ ID NO: 660365 - DNA, 51 bp, Artificial; identical to SEQ ID NO: 294991
  Synthetic oligonucleotide

SEQ ID NO: 660366 - DNA, 54 bp, Artificial; identical to SEQ ID NO: 289734
  Synthetic oligonucleotide

SEQ ID NO: 660367 - DNA, 55 bp, Artificial; identical to SEQ ID NO: 289735
  Synthetic oligonucleotide

SEQ ID NO: 660368 - DNA, 51 bp, Artificial; identical to SEQ ID NO: 294952
  Synthetic oligonucleotide

SEQ ID NO: 660369 - DNA, 54 bp, Artificial; identical to SEQ ID NO: 296982
  Synthetic oligonucleotide

SEQ ID NO: 660370 - DNA, 55 bp, Artificial; identical to SEQ ID NO: 289718
  Synthetic oligonucleotide

SEQ ID NO: 660371 - DNA, 55 bp, Artificial; identical to SEQ ID NO: 289717
  Synthetic oligonucleotide

SEQ ID NO: 660372 - DNA, 55 bp, Artificial; identical to SEQ ID NO: 289714
  Synthetic oligonucleotide

SEQ ID NO: 660373 - DNA, 55 bp, Artificial; identical to SEQ ID NO: 289712
  Synthetic oligonucleotide

SEQ ID NO: 660374 - DNA, 55 bp, Artificial; identical to SEQ ID NO: 289711
  Synthetic oligonucleotide

SEQ ID NO: 660375 - DNA, 51 bp, Artificial; identical to SEQ ID NO: 289710
  Synthetic oligonucleotide

SEQ ID NO: 660376 - DNA, 55 bp, Artificial; identical to SEQ ID NO: 289709
  Synthetic oligonucleotide

SEQ ID NO: 660377 - DNA, 50 bp, Artificial; identical to SEQ ID NO: 286919
  Synthetic oligonucleotide

SEQ ID NO: 660378 - DNA, 55 bp, Artificial; identical to SEQ ID NO: 289706
  Synthetic oligonucleotide

SEQ ID NO: 660379 - DNA, 55 bp, Artificial; identical to SEQ ID NO: 289634
  Synthetic oligonucleotide

SEQ ID NO: 660380 - DNA, 55 bp, Artificial; identical to SEQ ID NO: 289632
  Synthetic oligonucleotide

SEQ ID NO: 660381 - DNA, 51 bp, Artificial; identical to SEQ ID NO: 294988
  Synthetic oligonucleotide

SEQ ID NO: 660382 - DNA, 57 bp, Artificial; identical to SEQ ID NO: 290661
  Synthetic oligonucleotide

SEQ ID NO: 660383 - DNA, 51 bp, Artificial; identical to SEQ ID NO: 294911
  Synthetic oligonucleotide

SEQ ID NO: 660384 - DNA, 55 bp, Artificial; identical to SEQ ID NO: 289626
  Synthetic oligonucleotide

SEQ ID NO: 660385 - DNA, 54 bp, Artificial; identical to SEQ ID NO: 293059
  Synthetic oligonucleotide

SEQ ID NO: 660386 - DNA, 55 bp, Artificial; identical to SEQ ID NO: 289617
  Synthetic oligonucleotide

SEQ ID NO: 660387 - DNA, 55 bp, Artificial; identical to SEQ ID NO: 289615
  Synthetic oligonucleotide

SEQ ID NO: 660388 - DNA, 51 bp, Artificial; identical to SEQ ID NO: 294938
  Synthetic oligonucleotide

SEQ ID NO: 660389 - DNA, 55 bp, Artificial; identical to SEQ ID NO: 289612
  Synthetic oligonucleotide

SEQ ID NO: 660390 - DNA, 54 bp, Artificial; identical to SEQ ID NO: 293090
  Synthetic oligonucleotide

SEQ ID NO: 660391 - DNA, 55 bp, Artificial; identical to SEQ ID NO: 289611
  Synthetic oligonucleotide

SEQ ID NO: 660392 - DNA, 55 bp, Artificial; identical to SEQ ID NO: 289609
  Synthetic oligonucleotide

SEQ ID NO: 660393 - DNA, 55 bp, Artificial; identical to SEQ ID NO: 289608
  Synthetic oligonucleotide

SEQ ID NO: 660394 - DNA, 55 bp, Artificial; identical to SEQ ID NO: 289603
  Synthetic oligonucleotide

SEQ ID NO: 660395 - DNA, 55 bp, Artificial; identical to SEQ ID NO: 289602
  Synthetic oligonucleotide

SEQ ID NO: 660396 - DNA, 53 bp, Artificial; identical to SEQ ID NO: 293921
  Synthetic oligonucleotide

SEQ ID NO: 660397 - DNA, 55 bp, Artificial; identical to SEQ ID NO: 289657
  Synthetic oligonucleotide

SEQ ID NO: 660398 - DNA, 55 bp, Artificial; identical to SEQ ID NO: 289663
  Synthetic oligonucleotide

SEQ ID NO: 660399 - DNA, 55 bp, Artificial; identical to SEQ ID NO: 289664
  Synthetic oligonucleotide

SEQ ID NO: 660400 - DNA, 55 bp, Artificial; identical to SEQ ID NO: 289665
  Synthetic oligonucleotide

SEQ ID NO: 660401 - DNA, 55 bp, Artificial; identical to SEQ ID NO: 289667
  Synthetic oligonucleotide

SEQ ID NO: 660402 - DNA, 55 bp, Artificial; identical to SEQ ID NO: 289668
  Synthetic oligonucleotide

SEQ ID NO: 660403 - DNA, 55 bp, Artificial; identical to SEQ ID NO: 289653
  Synthetic oligonucleotide

SEQ ID NO: 660404 - DNA, 55 bp, Artificial; identical to SEQ ID NO: 289649
  Synthetic oligonucleotide

SEQ ID NO: 660405 - DNA, 55 bp, Artificial; identical to SEQ ID NO: 289647
  Synthetic oligonucleotide

SEQ ID NO: 660406 - DNA, 55 bp, Artificial; identical to SEQ ID NO: 289646
  Synthetic oligonucleotide

SEQ ID NO: 660407 - DNA, 50 bp, Artificial; identical to SEQ ID NO: 286830
  Synthetic oligonucleotide

SEQ ID NO: 660408 - DNA, 51 bp, Artificial; identical to SEQ ID NO: 294877
  Synthetic oligonucleotide

SEQ ID NO: 660409 - DNA, 53 bp, Artificial; identical to SEQ ID NO: 293867
  Synthetic oligonucleotide

SEQ ID NO: 660410 - DNA, 55 bp, Artificial; identical to SEQ ID NO: 289645
  Synthetic oligonucleotide

SEQ ID NO: 660411 - DNA, 55 bp, Artificial; identical to SEQ ID NO: 289643
  Synthetic oligonucleotide

SEQ ID NO: 660412 - DNA, 55 bp, Artificial; identical to SEQ ID NO: 289642
  Synthetic oligonucleotide

SEQ ID NO: 660413 - DNA, 57 bp, Artificial; identical to SEQ ID NO: 296059
  Synthetic oligonucleotide

SEQ ID NO: 660414 - DNA, 55 bp, Artificial; identical to SEQ ID NO: 289640
  Synthetic oligonucleotide

SEQ ID NO: 660415 - DNA, 55 bp, Artificial; identical to SEQ ID NO: 289637
  Synthetic oligonucleotide

SEQ ID NO: 660416 - DNA, 55 bp, Artificial; identical to SEQ ID NO: 289255
  Synthetic oligonucleotide

SEQ ID NO: 660417 - DNA, 55 bp, Artificial; identical to SEQ ID NO: 289257
  Synthetic oligonucleotide

SEQ ID NO: 660418 - DNA, 55 bp, Artificial; identical to SEQ ID NO: 289259
  Synthetic oligonucleotide

SEQ ID NO: 660419 - DNA, 54 bp, Artificial; identical to SEQ ID NO: 289262
  Synthetic oligonucleotide

SEQ ID NO: 660420 - DNA, 55 bp, Artificial; identical to SEQ ID NO: 289267
  Synthetic oligonucleotide

SEQ ID NO: 660421 - DNA, 60 bp, Artificial; identical to SEQ ID NO: 290938
  Synthetic oligonucleotide

SEQ ID NO: 660422 - DNA, 55 bp, Artificial; identical to SEQ ID NO: 289269
  Synthetic oligonucleotide

SEQ ID NO: 660423 - DNA, 55 bp, Artificial; identical to SEQ ID NO: 289270
  Synthetic oligonucleotide

SEQ ID NO: 660424 - DNA, 55 bp, Artificial; identical to SEQ ID NO: 289254
  Synthetic oligonucleotide

SEQ ID NO: 660425 - DNA, 55 bp, Artificial; identical to SEQ ID NO: 289252
  Synthetic oligonucleotide

SEQ ID NO: 660426 - DNA, 55 bp, Artificial; identical to SEQ ID NO: 289250
  Synthetic oligonucleotide

SEQ ID NO: 660427 - DNA, 59 bp, Artificial; identical to SEQ ID NO: 290827
  Synthetic oligonucleotide

SEQ ID NO: 660428 - DNA, 55 bp, Artificial; identical to SEQ ID NO: 289247
  Synthetic oligonucleotide

SEQ ID NO: 660429 - DNA, 55 bp, Artificial; identical to SEQ ID NO: 289246
  Synthetic oligonucleotide

SEQ ID NO: 660430 - DNA, 50 bp, Artificial; identical to SEQ ID NO: 286821
  Synthetic oligonucleotide

SEQ ID NO: 660431 - DNA, 51 bp, Artificial; identical to SEQ ID NO: 294934
  Synthetic oligonucleotide

SEQ ID NO: 660432 - DNA, 55 bp, Artificial; identical to SEQ ID NO: 289242
  Synthetic oligonucleotide

SEQ ID NO: 660433 - DNA, 55 bp, Artificial; identical to SEQ ID NO: 289240
  Synthetic oligonucleotide

SEQ ID NO: 660434 - DNA, 55 bp, Artificial; identical to SEQ ID NO: 289237
  Synthetic oligonucleotide

SEQ ID NO: 660435 - DNA, 55 bp, Artificial; identical to SEQ ID NO: 289291
  Synthetic oligonucleotide

SEQ ID NO: 660436 - DNA, 55 bp, Artificial; identical to SEQ ID NO: 289292
  Synthetic oligonucleotide

SEQ ID NO: 660437 - DNA, 55 bp, Artificial; identical to SEQ ID NO: 289295
  Synthetic oligonucleotide

SEQ ID NO: 660438 - DNA, 55 bp, Artificial; identical to SEQ ID NO: 289298
  Synthetic oligonucleotide

SEQ ID NO: 660439 - DNA, 55 bp, Artificial; identical to SEQ ID NO: 289300
  Synthetic oligonucleotide

SEQ ID NO: 660440 - DNA, 55 bp, Artificial; identical to SEQ ID NO: 289301
  Synthetic oligonucleotide

SEQ ID NO: 660441 - DNA, 55 bp, Artificial; identical to SEQ ID NO: 289302
  Synthetic oligonucleotide

SEQ ID NO: 660442 - DNA, 55 bp, Artificial; identical to SEQ ID NO: 289303
  Synthetic oligonucleotide

SEQ ID NO: 660443 - DNA, 54 bp, Artificial; identical to SEQ ID NO: 293137
  Synthetic oligonucleotide

SEQ ID NO: 660444 - DNA, 55 bp, Artificial; identical to SEQ ID NO: 289310
  Synthetic oligonucleotide

SEQ ID NO: 660445 - DNA, 55 bp, Artificial; identical to SEQ ID NO: 289288
  Synthetic oligonucleotide

SEQ ID NO: 660446 - DNA, 55 bp, Artificial; identical to SEQ ID NO: 289285
  Synthetic oligonucleotide

SEQ ID NO: 660447 - DNA, 55 bp, Artificial; identical to SEQ ID NO: 289283
  Synthetic oligonucleotide

SEQ ID NO: 660448 - DNA, 55 bp, Artificial; identical to SEQ ID NO: 289279
  Synthetic oligonucleotide

SEQ ID NO: 660449 - DNA, 60 bp, Artificial; identical to SEQ ID NO: 294293
  Synthetic oligonucleotide

SEQ ID NO: 660450 - DNA, 55 bp, Artificial; identical to SEQ ID NO: 289278
  Synthetic oligonucleotide

SEQ ID NO: 660451 - DNA, 60 bp, Artificial; identical to SEQ ID NO: 294182
  Synthetic oligonucleotide

SEQ ID NO: 660452 - DNA, 55 bp, Artificial; identical to SEQ ID NO: 289275
  Synthetic oligonucleotide

SEQ ID NO: 660453 - DNA, 55 bp, Artificial; identical to SEQ ID NO: 293848
  Synthetic oligonucleotide

SEQ ID NO: 660454 - DNA, 51 bp, Artificial; identical to SEQ ID NO: 294887
  Synthetic oligonucleotide

SEQ ID NO: 660455 - DNA, 52 bp, Artificial; identical to SEQ ID NO: 297170
  Synthetic oligonucleotide

SEQ ID NO: 660456 - DNA, 54 bp, Artificial; identical to SEQ ID NO: 293146
  Synthetic oligonucleotide

SEQ ID NO: 660457 - DNA, 55 bp, Artificial; identical to SEQ ID NO: 289199
  Synthetic oligonucleotide

SEQ ID NO: 660458 - DNA, 55 bp, Artificial; identical to SEQ ID NO: 289198
  Synthetic oligonucleotide

SEQ ID NO: 660459 - DNA, 55 bp, Artificial; identical to SEQ ID NO: 289197
  Synthetic oligonucleotide

SEQ ID NO: 660460 - DNA, 55 bp, Artificial; identical to SEQ ID NO: 289196
  Synthetic oligonucleotide

SEQ ID NO: 660461 - DNA, 53 bp, Artificial; identical to SEQ ID NO: 293663
  Synthetic oligonucleotide

SEQ ID NO: 660462 - DNA, 55 bp, Artificial; identical to SEQ ID NO: 296294
  Synthetic oligonucleotide

SEQ ID NO: 660463 - DNA, 50 bp, Artificial; identical to SEQ ID NO: 295073
  Synthetic oligonucleotide

SEQ ID NO: 660464 - DNA, 55 bp, Artificial; identical to SEQ ID NO: 289193
  Synthetic oligonucleotide

SEQ ID NO: 660465 - DNA, 55 bp, Artificial; identical to SEQ ID NO: 289192
  Synthetic oligonucleotide

SEQ ID NO: 660466 - DNA, 60 bp, Artificial; identical to SEQ ID NO: 287439
  Synthetic oligonucleotide

SEQ ID NO: 660467 - DNA, 53 bp, Artificial; identical to SEQ ID NO: 293661
  Synthetic oligonucleotide

SEQ ID NO: 660468 - DNA, 55 bp, Artificial; identical to SEQ ID NO: 289188
  Synthetic oligonucleotide

SEQ ID NO: 660469 - DNA, 55 bp, Artificial; identical to SEQ ID NO: 289186
  Synthetic oligonucleotide

SEQ ID NO: 660470 - DNA, 52 bp, Artificial; identical to SEQ ID NO: 294055
  Synthetic oligonucleotide

SEQ ID NO: 660471 - DNA, 59 bp, Artificial; identical to SEQ ID NO: 294238
  Synthetic oligonucleotide

SEQ ID NO: 660472 - DNA, 55 bp, Artificial; identical to SEQ ID NO: 289184
  Synthetic oligonucleotide

SEQ ID NO: 660473 - DNA, 55 bp, Artificial; identical to SEQ ID NO: 289179
  Synthetic oligonucleotide

SEQ ID NO: 660474 - DNA, 55 bp, Artificial; identical to SEQ ID NO: 289177
  Synthetic oligonucleotide

SEQ ID NO: 660475 - DNA, 55 bp, Artificial; identical to SEQ ID NO: 289176
  Synthetic oligonucleotide

SEQ ID NO: 660476 - DNA, 55 bp, Artificial; identical to SEQ ID NO: 289175
  Synthetic oligonucleotide

SEQ ID NO: 660477 - DNA, 55 bp, Artificial; identical to SEQ ID NO: 289172
  Synthetic oligonucleotide

SEQ ID NO: 660478 - DNA, 55 bp, Artificial; identical to SEQ ID NO: 289169
  Synthetic oligonucleotide

SEQ ID NO: 660479 - DNA, 55 bp, Artificial; identical to SEQ ID NO: 289168
  Synthetic oligonucleotide

SEQ ID NO: 660480 - DNA, 55 bp, Artificial; identical to SEQ ID NO: 289166
  Synthetic oligonucleotide

SEQ ID NO: 660481 - DNA, 55 bp, Artificial; identical to SEQ ID NO: 289165
  Synthetic oligonucleotide

SEQ ID NO: 660482 - DNA, 54 bp, Artificial; identical to SEQ ID NO: 293120
  Synthetic oligonucleotide

SEQ ID NO: 660483 - DNA, 56 bp, Artificial; identical to SEQ ID NO: 287394
  Synthetic oligonucleotide

SEQ ID NO: 660484 - DNA, 55 bp, Artificial; identical to SEQ ID NO: 289221
  Synthetic oligonucleotide

SEQ ID NO: 660485 - DNA, 60 bp, Artificial; identical to SEQ ID NO: 287383
  Synthetic oligonucleotide

SEQ ID NO: 660486 - DNA, 60 bp, Artificial; identical to SEQ ID NO: 287372
  Synthetic oligonucleotide

SEQ ID NO: 660487 - DNA, 57 bp, Artificial; identical to SEQ ID NO: 296260
  Synthetic oligonucleotide

SEQ ID NO: 660488 - DNA, 55 bp, Artificial; identical to SEQ ID NO: 289224
  Synthetic oligonucleotide

SEQ ID NO: 660489 - DNA, 55 bp, Artificial; identical to SEQ ID NO: 289226
  Synthetic oligonucleotide

SEQ ID NO: 660490 - DNA, 58 bp, Artificial; identical to SEQ ID NO: 286826
  Synthetic oligonucleotide

SEQ ID NO: 660491 - DNA, 54 bp, Artificial; identical to SEQ ID NO: 292990
  Synthetic oligonucleotide

SEQ ID NO: 660492 - DNA, 54 bp, Artificial; identical to SEQ ID NO: 292993
  Synthetic oligonucleotide

SEQ ID NO: 660493 - DNA, 52 bp, Artificial; identical to SEQ ID NO: 294200
  Synthetic oligonucleotide

SEQ ID NO: 660494 - DNA, 55 bp, Artificial; identical to SEQ ID NO: 289234
  Synthetic oligonucleotide

SEQ ID NO: 660495 - DNA, 55 bp, Artificial; identical to SEQ ID NO: 289235
  Synthetic oligonucleotide

SEQ ID NO: 660496 - DNA, 55 bp, Artificial; identical to SEQ ID NO: 289218
  Synthetic oligonucleotide

SEQ ID NO: 660497 - DNA, 55 bp, Artificial; identical to SEQ ID NO: 289217
  Synthetic oligonucleotide

SEQ ID NO: 660498 - DNA, 52 bp, Artificial; identical to SEQ ID NO: 296848
  Synthetic oligonucleotide

SEQ ID NO: 660499 - DNA, 57 bp, Artificial; identical to SEQ ID NO: 296249
  Synthetic oligonucleotide

SEQ ID NO: 660500 - DNA, 53 bp, Artificial; identical to SEQ ID NO: 293689
  Synthetic oligonucleotide

SEQ ID NO: 660501 - DNA, 55 bp, Artificial; identical to SEQ ID NO: 289214
  Synthetic oligonucleotide

SEQ ID NO: 660502 - DNA, 54 bp, Artificial; identical to SEQ ID NO: 293001
  Synthetic oligonucleotide

SEQ ID NO: 660503 - DNA, 53 bp, Artificial; identical to SEQ ID NO: 289209
  Synthetic oligonucleotide

SEQ ID NO: 660504 - DNA, 55 bp, Artificial; identical to SEQ ID NO: 289208
  Synthetic oligonucleotide

SEQ ID NO: 660505 - DNA, 54 bp, Artificial; identical to SEQ ID NO: 292981
  Synthetic oligonucleotide

SEQ ID NO: 660506 - DNA, 55 bp, Artificial; identical to SEQ ID NO: 289207
  Synthetic oligonucleotide

SEQ ID NO: 660507 - DNA, 55 bp, Artificial; identical to SEQ ID NO: 289206
  Synthetic oligonucleotide

SEQ ID NO: 660508 - DNA, 55 bp, Artificial; identical to SEQ ID NO: 289204
  Synthetic oligonucleotide

SEQ ID NO: 660509 - DNA, 60 bp, Artificial; identical to SEQ ID NO: 289738
  Synthetic oligonucleotide

SEQ ID NO: 660510 - DNA, 55 bp, Artificial; identical to SEQ ID NO: 289203
  Synthetic oligonucleotide

SEQ ID NO: 660511 - DNA, 52 bp, Artificial; identical to SEQ ID NO: 294193
  Synthetic oligonucleotide

SEQ ID NO: 660512 - DNA, 57 bp, Artificial; identical to SEQ ID NO: 289627
  Synthetic oligonucleotide

SEQ ID NO: 660513 - DNA, 52 bp, Artificial; identical to SEQ ID NO: 294192
  Synthetic oligonucleotide

SEQ ID NO: 660514 - DNA, 54 bp, Artificial; identical to SEQ ID NO: 289202
  Synthetic oligonucleotide

SEQ ID NO: 660515 - DNA, 54 bp, Artificial; identical to SEQ ID NO: 289201
  Synthetic oligonucleotide

SEQ ID NO: 660516 - DNA, 55 bp, Artificial; identical to SEQ ID NO: 289400
  Synthetic oligonucleotide

SEQ ID NO: 660517 - DNA, 59 bp, Artificial; identical to SEQ ID NO: 288960
  Synthetic oligonucleotide

SEQ ID NO: 660518 - DNA, 55 bp, Artificial; identical to SEQ ID NO: 289402
  Synthetic oligonucleotide

SEQ ID NO: 660519 - DNA, 55 bp, Artificial; identical to SEQ ID NO: 289403
  Synthetic oligonucleotide

SEQ ID NO: 660520 - DNA, 55 bp, Artificial; identical to SEQ ID NO: 289406
  Synthetic oligonucleotide

SEQ ID NO: 660521 - DNA, 55 bp, Artificial; identical to SEQ ID NO: 289408
  Synthetic oligonucleotide

SEQ ID NO: 660522 - DNA, 55 bp, Artificial; identical to SEQ ID NO: 289411
  Synthetic oligonucleotide

SEQ ID NO: 660523 - DNA, 53 bp, Artificial; identical to SEQ ID NO: 293680
  Synthetic oligonucleotide

SEQ ID NO: 660524 - DNA, 50 bp, Artificial; identical to SEQ ID NO: 295247
  Synthetic oligonucleotide

SEQ ID NO: 660525 - DNA, 59 bp, Artificial; identical to SEQ ID NO: 288071
  Synthetic oligonucleotide

SEQ ID NO: 660526 - DNA, 52 bp, Artificial; identical to SEQ ID NO: 294188
  Synthetic oligonucleotide

SEQ ID NO: 660527 - DNA, 50 bp, Artificial; identical to SEQ ID NO: 295343
  Synthetic oligonucleotide

SEQ ID NO: 660528 - DNA, 55 bp, Artificial; identical to SEQ ID NO: 289413
  Synthetic oligonucleotide

SEQ ID NO: 660529 - DNA, 54 bp, Artificial; identical to SEQ ID NO: 293025
  Synthetic oligonucleotide

SEQ ID NO: 660530 - DNA, 55 bp, Artificial; identical to SEQ ID NO: 287405
  Synthetic oligonucleotide

SEQ ID NO: 660531 - DNA, 55 bp, Artificial; identical to SEQ ID NO: 289414
  Synthetic oligonucleotide

SEQ ID NO: 660532 - DNA, 60 bp, Artificial; identical to SEQ ID NO: 296181
  Synthetic oligonucleotide

SEQ ID NO: 660533 - DNA, 51 bp, Artificial; identical to SEQ ID NO: 295001
  Synthetic oligonucleotide

SEQ ID NO: 660534 - DNA, 51 bp, Artificial; identical to SEQ ID NO: 294999
  Synthetic oligonucleotide

SEQ ID NO: 660535 - DNA, 55 bp, Artificial; identical to SEQ ID NO: 289418
  Synthetic oligonucleotide

SEQ ID NO: 660536 - DNA, 60 bp, Artificial; identical to SEQ ID NO: 292848
  Synthetic oligonucleotide

SEQ ID NO: 660537 - DNA, 60 bp, Artificial; identical to SEQ ID NO: 291737
  Synthetic oligonucleotide

SEQ ID NO: 660538 - DNA, 59 bp, Artificial; identical to SEQ ID NO: 290626
  Synthetic oligonucleotide

SEQ ID NO: 660539 - DNA, 55 bp, Artificial; identical to SEQ ID NO: 289399
  Synthetic oligonucleotide

SEQ ID NO: 660540 - DNA, 60 bp, Artificial; identical to SEQ ID NO: 291738
  Synthetic oligonucleotide

SEQ ID NO: 660541 - DNA, 59 bp, Artificial; identical to SEQ ID NO: 291960
  Synthetic oligonucleotide

SEQ ID NO: 660542 - DNA, 55 bp, Artificial; identical to SEQ ID NO: 289396
  Synthetic oligonucleotide

SEQ ID NO: 660543 - DNA, 55 bp, Artificial; identical to SEQ ID NO: 289395
  Synthetic oligonucleotide

SEQ ID NO: 660544 - DNA, 57 bp, Artificial; identical to SEQ ID NO: 292404
  Synthetic oligonucleotide

SEQ ID NO: 660545 - DNA, 51 bp, Artificial; identical to SEQ ID NO: 294461
  Synthetic oligonucleotide

SEQ ID NO: 660546 - DNA, 55 bp, Artificial; identical to SEQ ID NO: 289390
  Synthetic oligonucleotide

SEQ ID NO: 660547 - DNA, 55 bp, Artificial; identical to SEQ ID NO: 289388
  Synthetic oligonucleotide

SEQ ID NO: 660548 - DNA, 55 bp, Artificial; identical to SEQ ID NO: 289387
  Synthetic oligonucleotide

SEQ ID NO: 660549 - DNA, 51 bp, Artificial; identical to SEQ ID NO: 294472
  Synthetic oligonucleotide

SEQ ID NO: 660550 - DNA, 52 bp, Artificial; identical to SEQ ID NO: 294181
  Synthetic oligonucleotide

SEQ ID NO: 660551 - DNA, 55 bp, Artificial; identical to SEQ ID NO: 289384
  Synthetic oligonucleotide

SEQ ID NO: 660552 - DNA, 50 bp, Artificial; identical to SEQ ID NO: 295298
  Synthetic oligonucleotide

SEQ ID NO: 660553 - DNA, 55 bp, Artificial; identical to SEQ ID NO: 289436
  Synthetic oligonucleotide

SEQ ID NO: 660554 - DNA, 53 bp, Artificial; identical to SEQ ID NO: 293620
  Synthetic oligonucleotide

SEQ ID NO: 660555 - DNA, 55 bp, Artificial; identical to SEQ ID NO: 289442
  Synthetic oligonucleotide

SEQ ID NO: 660556 - DNA, 58 bp, Artificial; identical to SEQ ID NO: 291515
  Synthetic oligonucleotide

SEQ ID NO: 660557 - DNA, 52 bp, Artificial; identical to SEQ ID NO: 294180
  Synthetic oligonucleotide

SEQ ID NO: 660558 - DNA, 55 bp, Artificial; identical to SEQ ID NO: 289443
  Synthetic oligonucleotide

SEQ ID NO: 660559 - DNA, 57 bp, Artificial; identical to SEQ ID NO: 291293
  Synthetic oligonucleotide

SEQ ID NO: 660560 - DNA, 57 bp, Artificial; identical to SEQ ID NO: 296427
  Synthetic oligonucleotide

SEQ ID NO: 660561 - DNA, 53 bp, Artificial; identical to SEQ ID NO: 293614
  Synthetic oligonucleotide

SEQ ID NO: 660562 - DNA, 54 bp, Artificial; identical to SEQ ID NO: 293432
  Synthetic oligonucleotide

SEQ ID NO: 660563 - DNA, 54 bp, Artificial; identical to SEQ ID NO: 289445
  Synthetic oligonucleotide

SEQ ID NO: 660564 - DNA, 53 bp, Artificial; identical to SEQ ID NO: 293612
  Synthetic oligonucleotide

SEQ ID NO: 660565 - DNA, 57 bp, Artificial; identical to SEQ ID NO: 291182
  Synthetic oligonucleotide

SEQ ID NO: 660566 - DNA, 55 bp, Artificial; identical to SEQ ID NO: 289450
  Synthetic oligonucleotide

SEQ ID NO: 660567 - DNA, 51 bp, Artificial; identical to SEQ ID NO: 294469
  Synthetic oligonucleotide

SEQ ID NO: 660568 - DNA, 52 bp, Artificial; identical to SEQ ID NO: 294224
  Synthetic oligonucleotide

SEQ ID NO: 660569 - DNA, 55 bp, Artificial; identical to SEQ ID NO: 289453
  Synthetic oligonucleotide

SEQ ID NO: 660570 - DNA, 55 bp, Artificial; identical to SEQ ID NO: 289454
  Synthetic oligonucleotide

SEQ ID NO: 660571 - DNA, 60 bp, Artificial; identical to SEQ ID NO: 290738
  Synthetic oligonucleotide

SEQ ID NO: 660572 - DNA, 55 bp, Artificial; identical to SEQ ID NO: 289435
  Synthetic oligonucleotide

SEQ ID NO: 660573 - DNA, 55 bp, Artificial; identical to SEQ ID NO: 289433
  Synthetic oligonucleotide

SEQ ID NO: 660574 - DNA, 55 bp, Artificial; identical to SEQ ID NO: 289432
  Synthetic oligonucleotide

SEQ ID NO: 660575 - DNA, 55 bp, Artificial; identical to SEQ ID NO: 289431
  Synthetic oligonucleotide

SEQ ID NO: 660576 - DNA, 59 bp, Artificial; identical to SEQ ID NO: 294427
  Synthetic oligonucleotide

SEQ ID NO: 660577 - DNA, 53 bp, Artificial; identical to SEQ ID NO: 293606
  Synthetic oligonucleotide

SEQ ID NO: 660578 - DNA, 53 bp, Artificial; identical to SEQ ID NO: 293603
  Synthetic oligonucleotide

SEQ ID NO: 660579 - DNA, 53 bp, Artificial; identical to SEQ ID NO: 293647
  Synthetic oligonucleotide

SEQ ID NO: 660580 - DNA, 58 bp, Artificial; identical to SEQ ID NO: 294438
  Synthetic oligonucleotide

SEQ ID NO: 660581 - DNA, 55 bp, Artificial; identical to SEQ ID NO: 289426
  Synthetic oligonucleotide

SEQ ID NO: 660582 - DNA, 55 bp, Artificial; identical to SEQ ID NO: 289425
  Synthetic oligonucleotide

SEQ ID NO: 660583 - DNA, 55 bp, Artificial; identical to SEQ ID NO: 289424
  Synthetic oligonucleotide

SEQ ID NO: 660584 - DNA, 60 bp, Artificial; identical to SEQ ID NO: 288672
  Synthetic oligonucleotide

SEQ ID NO: 660585 - DNA, 56 bp, Artificial; identical to SEQ ID NO: 286827
  Synthetic oligonucleotide

SEQ ID NO: 660586 - DNA, 55 bp, Artificial; identical to SEQ ID NO: 289422
  Synthetic oligonucleotide

SEQ ID NO: 660587 - DNA, 55 bp, Artificial; identical to SEQ ID NO: 289421
  Synthetic oligonucleotide

SEQ ID NO: 660588 - DNA, 54 bp, Artificial; identical to SEQ ID NO: 289419
  Synthetic oligonucleotide

SEQ ID NO: 660589 - DNA, 55 bp, Artificial; identical to SEQ ID NO: 286804
  Synthetic oligonucleotide

SEQ ID NO: 660590 - DNA, 55 bp, Artificial; identical to SEQ ID NO: 289345
  Synthetic oligonucleotide

SEQ ID NO: 660591 - DNA, 54 bp, Artificial; identical to SEQ ID NO: 288616
  Synthetic oligonucleotide

SEQ ID NO: 660592 - DNA, 52 bp, Artificial; identical to SEQ ID NO: 289342
  Synthetic oligonucleotide

SEQ ID NO: 660593 - DNA, 55 bp, Artificial; identical to SEQ ID NO: 289341
  Synthetic oligonucleotide

SEQ ID NO: 660594 - DNA, 56 bp, Artificial; identical to SEQ ID NO: 288594
  Synthetic oligonucleotide

SEQ ID NO: 660595 - DNA, 54 bp, Artificial; identical to SEQ ID NO: 293368
  Synthetic oligonucleotide

SEQ ID NO: 660596 - DNA, 54 bp, Artificial; identical to SEQ ID NO: 293365
  Synthetic oligonucleotide

SEQ ID NO: 660597 - DNA, 55 bp, Artificial; identical to SEQ ID NO: 289339
  Synthetic oligonucleotide

SEQ ID NO: 660598 - DNA, 60 bp, Artificial; identical to SEQ ID NO: 288583
  Synthetic oligonucleotide

SEQ ID NO: 660599 - DNA, 56 bp, Artificial; identical to SEQ ID NO: 288550
  Synthetic oligonucleotide

SEQ ID NO: 660600 - DNA, 52 bp, Artificial; identical to SEQ ID NO: 294214
  Synthetic oligonucleotide

SEQ ID NO: 660601 - DNA, 51 bp, Artificial; identical to SEQ ID NO: 294691
  Synthetic oligonucleotide

SEQ ID NO: 660602 - DNA, 55 bp, Artificial; identical to SEQ ID NO: 289336
  Synthetic oligonucleotide

SEQ ID NO: 660603 - DNA, 55 bp, Artificial; identical to SEQ ID NO: 289333
  Synthetic oligonucleotide

SEQ ID NO: 660604 - DNA, 55 bp, Artificial; identical to SEQ ID NO: 289332
  Synthetic oligonucleotide

SEQ ID NO: 660605 - DNA, 55 bp, Artificial; identical to SEQ ID NO: 289331
  Synthetic oligonucleotide

SEQ ID NO: 660606 - DNA, 58 bp, Artificial; identical to SEQ ID NO: 288483
  Synthetic oligonucleotide

SEQ ID NO: 660607 - DNA, 55 bp, Artificial; identical to SEQ ID NO: 289330
  Synthetic oligonucleotide

SEQ ID NO: 660608 - DNA, 53 bp, Artificial; identical to SEQ ID NO: 293630
  Synthetic oligonucleotide

SEQ ID NO: 660609 - DNA, 52 bp, Artificial; identical to SEQ ID NO: 294211
  Synthetic oligonucleotide

SEQ ID NO: 660610 - DNA, 55 bp, Artificial; identical to SEQ ID NO: 289329
  Synthetic oligonucleotide

SEQ ID NO: 660611 - DNA, 54 bp, Artificial; identical to SEQ ID NO: 293336
  Synthetic oligonucleotide

SEQ ID NO: 660612 - DNA, 51 bp, Artificial; identical to SEQ ID NO: 294652
  Synthetic oligonucleotide

SEQ ID NO: 660613 - DNA, 55 bp, Artificial; identical to SEQ ID NO: 289328
  Synthetic oligonucleotide

SEQ ID NO: 660614 - DNA, 55 bp, Artificial; identical to SEQ ID NO: 289325
  Synthetic oligonucleotide

SEQ ID NO: 660615 - DNA, 55 bp, Artificial; identical to SEQ ID NO: 289324
  Synthetic oligonucleotide

SEQ ID NO: 660616 - DNA, 50 bp, Artificial; identical to SEQ ID NO: 295398
  Synthetic oligonucleotide

SEQ ID NO: 660617 - DNA, 51 bp, Artificial; identical to SEQ ID NO: 294667
  Synthetic oligonucleotide

SEQ ID NO: 660618 - DNA, 59 bp, Artificial; identical to SEQ ID NO: 295037
  Synthetic oligonucleotide

SEQ ID NO: 660619 - DNA, 55 bp, Artificial; identical to SEQ ID NO: 289322
  Synthetic oligonucleotide

SEQ ID NO: 660620 - DNA, 54 bp, Artificial; identical to SEQ ID NO: 289321
  Synthetic oligonucleotide

SEQ ID NO: 660621 - DNA, 54 bp, Artificial; identical to SEQ ID NO: 289318
  Synthetic oligonucleotide

SEQ ID NO: 660622 - DNA, 55 bp, Artificial; identical to SEQ ID NO: 289317
  Synthetic oligonucleotide

SEQ ID NO: 660623 - DNA, 58 bp, Artificial; identical to SEQ ID NO: 288393
  Synthetic oligonucleotide

SEQ ID NO: 660624 - DNA, 58 bp, Artificial; identical to SEQ ID NO: 288382
  Synthetic oligonucleotide

SEQ ID NO: 660625 - DNA, 52 bp, Artificial; identical to SEQ ID NO: 288371
  Synthetic oligonucleotide

SEQ ID NO: 660626 - DNA, 55 bp, Artificial; identical to SEQ ID NO: 289313
  Synthetic oligonucleotide

SEQ ID NO: 660627 - DNA, 60 bp, Artificial; identical to SEQ ID NO: 288338
  Synthetic oligonucleotide

SEQ ID NO: 660628 - DNA, 55 bp, Artificial; identical to SEQ ID NO: 289312
  Synthetic oligonucleotide

SEQ ID NO: 660629 - DNA, 55 bp, Artificial; identical to SEQ ID NO: 289311
  Synthetic oligonucleotide

SEQ ID NO: 660630 - DNA, 59 bp, Artificial; identical to SEQ ID NO: 288861
  Synthetic oligonucleotide

SEQ ID NO: 660631 - DNA, 60 bp, Artificial; identical to SEQ ID NO: 288905
  Synthetic oligonucleotide

SEQ ID NO: 660632 - DNA, 55 bp, Artificial; identical to SEQ ID NO: 289370
  Synthetic oligonucleotide

SEQ ID NO: 660633 - DNA, 50 bp, Artificial; identical to SEQ ID NO: 295043
  Synthetic oligonucleotide

SEQ ID NO: 660634 - DNA, 60 bp, Artificial; identical to SEQ ID NO: 288927
  Synthetic oligonucleotide

SEQ ID NO: 660635 - DNA, 55 bp, Artificial; identical to SEQ ID NO: 289372
  Synthetic oligonucleotide

SEQ ID NO: 660636 - DNA, 55 bp, Artificial; identical to SEQ ID NO: 289373
  Synthetic oligonucleotide

SEQ ID NO: 660637 - DNA, 55 bp, Artificial; identical to SEQ ID NO: 289374
  Synthetic oligonucleotide

SEQ ID NO: 660638 - DNA, 60 bp, Artificial; identical to SEQ ID NO: 288961
  Synthetic oligonucleotide

SEQ ID NO: 660639 - DNA, 55 bp, Artificial; identical to SEQ ID NO: 289376
  Synthetic oligonucleotide

SEQ ID NO: 660640 - DNA, 55 bp, Artificial; identical to SEQ ID NO: 289377
  Synthetic oligonucleotide

SEQ ID NO: 660641 - DNA, 57 bp, Artificial; identical to SEQ ID NO: 296071
  Synthetic oligonucleotide

SEQ ID NO: 660642 - DNA, 53 bp, Artificial; identical to SEQ ID NO: 293750
  Synthetic oligonucleotide

SEQ ID NO: 660643 - DNA, 55 bp, Artificial; identical to SEQ ID NO: 289381
  Synthetic oligonucleotide

SEQ ID NO: 660644 - DNA, 55 bp, Artificial; identical to SEQ ID NO: 289363
  Synthetic oligonucleotide

SEQ ID NO: 660645 - DNA, 50 bp, Artificial; identical to SEQ ID NO: 295053
  Synthetic oligonucleotide

SEQ ID NO: 660646 - DNA, 55 bp, Artificial; identical to SEQ ID NO: 289361
  Synthetic oligonucleotide

SEQ ID NO: 660647 - DNA, 53 bp, Artificial; identical to SEQ ID NO: 293746
  Synthetic oligonucleotide

SEQ ID NO: 660648 - DNA, 53 bp, Artificial; identical to SEQ ID NO: 293745
  Synthetic oligonucleotide

SEQ ID NO: 660649 - DNA, 55 bp, Artificial; identical to SEQ ID NO: 289358
  Synthetic oligonucleotide

SEQ ID NO: 660650 - DNA, 53 bp, Artificial; identical to SEQ ID NO: 293743
  Synthetic oligonucleotide

SEQ ID NO: 660651 - DNA, 60 bp, Artificial; identical to SEQ ID NO: 288850
  Synthetic oligonucleotide

SEQ ID NO: 660652 - DNA, 55 bp, Artificial; identical to SEQ ID NO: 289356
  Synthetic oligonucleotide

SEQ ID NO: 660653 - DNA, 57 bp, Artificial; identical to SEQ ID NO: 288816
  Synthetic oligonucleotide

SEQ ID NO: 660654 - DNA, 54 bp, Artificial; identical to SEQ ID NO: 293366
  Synthetic oligonucleotide

SEQ ID NO: 660655 - DNA, 52 bp, Artificial; identical to SEQ ID NO: 294148
  Synthetic oligonucleotide

SEQ ID NO: 660656 - DNA, 60 bp, Artificial; identical to SEQ ID NO: 288805
  Synthetic oligonucleotide

SEQ ID NO: 660657 - DNA, 55 bp, Artificial; identical to SEQ ID NO: 289354
  Synthetic oligonucleotide

SEQ ID NO: 660658 - DNA, 50 bp, Artificial; identical to SEQ ID NO: 295158
  Synthetic oligonucleotide

SEQ ID NO: 660659 - DNA, 55 bp, Artificial; identical to SEQ ID NO: 289350
  Synthetic oligonucleotide

SEQ ID NO: 660660 - DNA, 56 bp, Artificial; identical to SEQ ID NO: 288739
  Synthetic oligonucleotide

SEQ ID NO: 660661 - DNA, 55 bp, Artificial; identical to SEQ ID NO: 289348
  Synthetic oligonucleotide

SEQ ID NO: 660662 - DNA, 51 bp, Artificial; identical to SEQ ID NO: 294552
  Synthetic oligonucleotide

SEQ ID NO: 660663 - DNA, 53 bp, Artificial; identical to SEQ ID NO: 293778
  Synthetic oligonucleotide

SEQ ID NO: 660664 - DNA, 52 bp, Artificial; identical to SEQ ID NO: 294141
  Synthetic oligonucleotide

SEQ ID NO: 660665 - DNA, 55 bp, Artificial; identical to SEQ ID NO: 290115
  Synthetic oligonucleotide

SEQ ID NO: 660666 - DNA, 55 bp, Artificial; identical to SEQ ID NO: 290117
  Synthetic oligonucleotide

SEQ ID NO: 660667 - DNA, 55 bp, Artificial; identical to SEQ ID NO: 290118
  Synthetic oligonucleotide

SEQ ID NO: 660668 - DNA, 55 bp, Artificial; identical to SEQ ID NO: 290119
  Synthetic oligonucleotide

SEQ ID NO: 660669 - DNA, 59 bp, Artificial; identical to SEQ ID NO: 295127
  Synthetic oligonucleotide

SEQ ID NO: 660670 - DNA, 59 bp, Artificial; identical to SEQ ID NO: 288694
  Synthetic oligonucleotide

SEQ ID NO: 660671 - DNA, 55 bp, Artificial; identical to SEQ ID NO: 290123
  Synthetic oligonucleotide

SEQ ID NO: 660672 - DNA, 55 bp, Artificial; identical to SEQ ID NO: 290124
  Synthetic oligonucleotide

SEQ ID NO: 660673 - DNA, 52 bp, Artificial; identical to SEQ ID NO: 294140
  Synthetic oligonucleotide

SEQ ID NO: 660674 - DNA, 55 bp, Artificial; identical to SEQ ID NO: 290125
  Synthetic oligonucleotide

SEQ ID NO: 660675 - DNA, 55 bp, Artificial; identical to SEQ ID NO: 290128
  Synthetic oligonucleotide

SEQ ID NO: 660676 - DNA, 55 bp, Artificial; identical to SEQ ID NO: 290129
  Synthetic oligonucleotide

SEQ ID NO: 660677 - DNA, 55 bp, Artificial; identical to SEQ ID NO: 290132
  Synthetic oligonucleotide

SEQ ID NO: 660678 - DNA, 55 bp, Artificial; identical to SEQ ID NO: 290113
  Synthetic oligonucleotide

SEQ ID NO: 660679 - DNA, 55 bp, Artificial; identical to SEQ ID NO: 290112
  Synthetic oligonucleotide

SEQ ID NO: 660680 - DNA, 54 bp, Artificial; identical to SEQ ID NO: 293379
  Synthetic oligonucleotide

SEQ ID NO: 660681 - DNA, 52 bp, Artificial; identical to SEQ ID NO: 294137
  Synthetic oligonucleotide

SEQ ID NO: 660682 - DNA, 55 bp, Artificial; identical to SEQ ID NO: 290103
  Synthetic oligonucleotide

SEQ ID NO: 660683 - DNA, 51 bp, Artificial; identical to SEQ ID NO: 294642
  Synthetic oligonucleotide

SEQ ID NO: 660684 - DNA, 55 bp, Artificial; identical to SEQ ID NO: 290101
  Synthetic oligonucleotide

SEQ ID NO: 660685 - DNA, 59 bp, Artificial; identical to SEQ ID NO: 287872
  Synthetic oligonucleotide

SEQ ID NO: 660686 - DNA, 55 bp, Artificial; identical to SEQ ID NO: 290099
  Synthetic oligonucleotide

SEQ ID NO: 660687 - DNA, 50 bp, Artificial; identical to SEQ ID NO: 290098
  Synthetic oligonucleotide

SEQ ID NO: 660688 - DNA, 54 bp, Artificial; identical to SEQ ID NO: 293387
  Synthetic oligonucleotide

SEQ ID NO: 660689 - DNA, 53 bp, Artificial; identical to SEQ ID NO: 293767
  Synthetic oligonucleotide

SEQ ID NO: 660690 - DNA, 55 bp, Artificial; identical to SEQ ID NO: 290155
  Synthetic oligonucleotide

SEQ ID NO: 660691 - DNA, 54 bp, Artificial; identical to SEQ ID NO: 293340
  Synthetic oligonucleotide

SEQ ID NO: 660692 - DNA, 55 bp, Artificial; identical to SEQ ID NO: 290158
  Synthetic oligonucleotide

SEQ ID NO: 660693 - DNA, 54 bp, Artificial; identical to SEQ ID NO: 293341
  Synthetic oligonucleotide

SEQ ID NO: 660694 - DNA, 53 bp, Artificial; identical to SEQ ID NO: 293765
  Synthetic oligonucleotide

SEQ ID NO: 660695 - DNA, 55 bp, Artificial; identical to SEQ ID NO: 290163
  Synthetic oligonucleotide

SEQ ID NO: 660696 - DNA, 54 bp, Artificial; identical to SEQ ID NO: 293345
  Synthetic oligonucleotide

SEQ ID NO: 660697 - DNA, 53 bp, Artificial; identical to SEQ ID NO: 293764
  Synthetic oligonucleotide

SEQ ID NO: 660698 - DNA, 54 bp, Artificial; identical to SEQ ID NO: 293348
  Synthetic oligonucleotide

SEQ ID NO: 660699 - DNA, 55 bp, Artificial; identical to SEQ ID NO: 290145
  Synthetic oligonucleotide

SEQ ID NO: 660700 - DNA, 55 bp, Artificial; identical to SEQ ID NO: 290139
  Synthetic oligonucleotide

SEQ ID NO: 660701 - DNA, 55 bp, Artificial; identical to SEQ ID NO: 290136
  Synthetic oligonucleotide

SEQ ID NO: 660702 - DNA, 58 bp, Artificial; identical to SEQ ID NO: 295604
  Synthetic oligonucleotide

SEQ ID NO: 660703 - DNA, 53 bp, Artificial; identical to SEQ ID NO: 293761
  Synthetic oligonucleotide

SEQ ID NO: 660704 - DNA, 52 bp, Artificial; identical to SEQ ID NO: 294135
  Synthetic oligonucleotide

SEQ ID NO: 660705 - DNA, 54 bp, Artificial; identical to SEQ ID NO: 293356
  Synthetic oligonucleotide

SEQ ID NO: 660706 - DNA, 55 bp, Artificial; identical to SEQ ID NO: 290053
  Synthetic oligonucleotide

SEQ ID NO: 660707 - DNA, 50 bp, Artificial; identical to SEQ ID NO: 296079
  Synthetic oligonucleotide

SEQ ID NO: 660708 - DNA, 54 bp, Artificial; identical to SEQ ID NO: 293357
  Synthetic oligonucleotide

SEQ ID NO: 660709 - DNA, 55 bp, Artificial; identical to SEQ ID NO: 290051
  Synthetic oligonucleotide

SEQ ID NO: 660710 - DNA, 55 bp, Artificial; identical to SEQ ID NO: 290048
  Synthetic oligonucleotide

SEQ ID NO: 660711 - DNA, 55 bp, Artificial; identical to SEQ ID NO: 290047
  Synthetic oligonucleotide

SEQ ID NO: 660712 - DNA, 54 bp, Artificial; identical to SEQ ID NO: 293417
  Synthetic oligonucleotide

SEQ ID NO: 660713 - DNA, 59 bp, Artificial; identical to SEQ ID NO: 294948
  Synthetic oligonucleotide

SEQ ID NO: 660714 - DNA, 55 bp, Artificial; identical to SEQ ID NO: 290045
  Synthetic oligonucleotide

SEQ ID NO: 660715 - DNA, 54 bp, Artificial; identical to SEQ ID NO: 293421
  Synthetic oligonucleotide

SEQ ID NO: 660716 - DNA, 55 bp, Artificial; identical to SEQ ID NO: 290041
  Synthetic oligonucleotide

SEQ ID NO: 660717 - DNA, 52 bp, Artificial; identical to SEQ ID NO: 294132
  Synthetic oligonucleotide

SEQ ID NO: 660718 - DNA, 55 bp, Artificial; identical to SEQ ID NO: 290040
  Synthetic oligonucleotide

SEQ ID NO: 660719 - DNA, 55 bp, Artificial; identical to SEQ ID NO: 290039
  Synthetic oligonucleotide

SEQ ID NO: 660720 - DNA, 53 bp, Artificial; identical to SEQ ID NO: 293713
  Synthetic oligonucleotide

SEQ ID NO: 660721 - DNA, 55 bp, Artificial; identical to SEQ ID NO: 290036
  Synthetic oligonucleotide

SEQ ID NO: 660722 - DNA, 55 bp, Artificial; identical to SEQ ID NO: 290032
  Synthetic oligonucleotide

SEQ ID NO: 660723 - DNA, 53 bp, Artificial; identical to SEQ ID NO: 293711
  Synthetic oligonucleotide

SEQ ID NO: 660724 - DNA, 55 bp, Artificial; identical to SEQ ID NO: 290031
  Synthetic oligonucleotide

SEQ ID NO: 660725 - DNA, 55 bp, Artificial; identical to SEQ ID NO: 290030
  Synthetic oligonucleotide

SEQ ID NO: 660726 - DNA, 58 bp, Artificial; identical to SEQ ID NO: 295627
  Synthetic oligonucleotide

SEQ ID NO: 660727 - DNA, 55 bp, Artificial; identical to SEQ ID NO: 290029
  Synthetic oligonucleotide

SEQ ID NO: 660728 - DNA, 55 bp, Artificial; identical to SEQ ID NO: 290028
  Synthetic oligonucleotide

SEQ ID NO: 660729 - DNA, 55 bp, Artificial; identical to SEQ ID NO: 290078
  Synthetic oligonucleotide

SEQ ID NO: 660730 - DNA, 55 bp, Artificial; identical to SEQ ID NO: 290079
  Synthetic oligonucleotide

SEQ ID NO: 660731 - DNA, 55 bp, Artificial; identical to SEQ ID NO: 290080
  Synthetic oligonucleotide

SEQ ID NO: 660732 - DNA, 55 bp, Artificial; identical to SEQ ID NO: 290081
  Synthetic oligonucleotide

SEQ ID NO: 660733 - DNA, 60 bp, Artificial; identical to SEQ ID NO: 288205
  Synthetic oligonucleotide

SEQ ID NO: 660734 - DNA, 55 bp, Artificial; identical to SEQ ID NO: 290088
  Synthetic oligonucleotide

SEQ ID NO: 660735 - DNA, 55 bp, Artificial; identical to SEQ ID NO: 290090
  Synthetic oligonucleotide

SEQ ID NO: 660736 - DNA, 55 bp, Artificial; identical to SEQ ID NO: 290091
  Synthetic oligonucleotide

SEQ ID NO: 660737 - DNA, 54 bp, Artificial; identical to SEQ ID NO: 293390
  Synthetic oligonucleotide

SEQ ID NO: 660738 - DNA, 54 bp, Artificial; identical to SEQ ID NO: 293397
  Synthetic oligonucleotide

SEQ ID NO: 660739 - DNA, 55 bp, Artificial; identical to SEQ ID NO: 290095
  Synthetic oligonucleotide

SEQ ID NO: 660740 - DNA, 57 bp, Artificial; identical to SEQ ID NO: 288282
  Synthetic oligonucleotide

SEQ ID NO: 660741 - DNA, 55 bp, Artificial; identical to SEQ ID NO: 290077
  Synthetic oligonucleotide

SEQ ID NO: 660742 - DNA, 53 bp, Artificial; identical to SEQ ID NO: 293698
  Synthetic oligonucleotide

SEQ ID NO: 660743 - DNA, 55 bp, Artificial; identical to SEQ ID NO: 290075
  Synthetic oligonucleotide

SEQ ID NO: 660744 - DNA, 55 bp, Artificial; identical to SEQ ID NO: 290074
  Synthetic oligonucleotide

SEQ ID NO: 660745 - DNA, 59 bp, Artificial; identical to SEQ ID NO: 288316
  Synthetic oligonucleotide

SEQ ID NO: 660746 - DNA, 54 bp, Artificial; identical to SEQ ID NO: 290070
  Synthetic oligonucleotide

SEQ ID NO: 660747 - DNA, 55 bp, Artificial; identical to SEQ ID NO: 290069
  Synthetic oligonucleotide

SEQ ID NO: 660748 - DNA, 55 bp, Artificial; identical to SEQ ID NO: 290068
  Synthetic oligonucleotide

SEQ ID NO: 660749 - DNA, 55 bp, Artificial; identical to SEQ ID NO: 290067
  Synthetic oligonucleotide

SEQ ID NO: 660750 - DNA, 55 bp, Artificial; identical to SEQ ID NO: 294937
  Synthetic oligonucleotide

SEQ ID NO: 660751 - DNA, 55 bp, Artificial; identical to SEQ ID NO: 290066
  Synthetic oligonucleotide

SEQ ID NO: 660752 - DNA, 51 bp, Artificial; identical to SEQ ID NO: 294579
  Synthetic oligonucleotide

SEQ ID NO: 660753 - DNA, 58 bp, Artificial; identical to SEQ ID NO: 288094
  Synthetic oligonucleotide

SEQ ID NO: 660754 - DNA, 53 bp, Artificial; identical to SEQ ID NO: 288083
  Synthetic oligonucleotide

SEQ ID NO: 660755 - DNA, 55 bp, Artificial; identical to SEQ ID NO: 290064
  Synthetic oligonucleotide

SEQ ID NO: 660756 - DNA, 59 bp, Artificial; identical to SEQ ID NO: 288072
  Synthetic oligonucleotide

SEQ ID NO: 660757 - DNA, 55 bp, Artificial; identical to SEQ ID NO: 290063
  Synthetic oligonucleotide

SEQ ID NO: 660758 - DNA, 55 bp, Artificial; identical to SEQ ID NO: 290256
  Synthetic oligonucleotide

SEQ ID NO: 660759 - DNA, 55 bp, Artificial; identical to SEQ ID NO: 290257
  Synthetic oligonucleotide

SEQ ID NO: 660760 - DNA, 55 bp, Artificial; identical to SEQ ID NO: 290259
  Synthetic oligonucleotide

SEQ ID NO: 660761 - DNA, 55 bp, Artificial; identical to SEQ ID NO: 290261
  Synthetic oligonucleotide

SEQ ID NO: 660762 - DNA, 53 bp, Artificial; identical to SEQ ID NO: 293732
  Synthetic oligonucleotide

SEQ ID NO: 660763 - DNA, 55 bp, Artificial; identical to SEQ ID NO: 290268
  Synthetic oligonucleotide

SEQ ID NO: 660764 - DNA, 53 bp, Artificial; identical to SEQ ID NO: 293731
  Synthetic oligonucleotide

SEQ ID NO: 660765 - DNA, 55 bp, Artificial; identical to SEQ ID NO: 290269
  Synthetic oligonucleotide

SEQ ID NO: 660766 - DNA, 55 bp, Artificial; identical to SEQ ID NO: 287983
  Synthetic oligonucleotide

SEQ ID NO: 660767 - DNA, 54 bp, Artificial; identical to SEQ ID NO: 293212
  Synthetic oligonucleotide

SEQ ID NO: 660768 - DNA, 55 bp, Artificial; identical to SEQ ID NO: 290270
  Synthetic oligonucleotide

SEQ ID NO: 660769 - DNA, 53 bp, Artificial; identical to SEQ ID NO: 293727
  Synthetic oligonucleotide

SEQ ID NO: 660770 - DNA, 51 bp, Artificial; identical to SEQ ID NO: 294713
  Synthetic oligonucleotide

SEQ ID NO: 660771 - DNA, 55 bp, Artificial; identical to SEQ ID NO: 290253
  Synthetic oligonucleotide

SEQ ID NO: 660772 - DNA, 55 bp, Artificial; identical to SEQ ID NO: 290252
  Synthetic oligonucleotide

SEQ ID NO: 660773 - DNA, 54 bp, Artificial; identical to SEQ ID NO: 293211
  Synthetic oligonucleotide

SEQ ID NO: 660774 - DNA, 54 bp, Artificial; identical to SEQ ID NO: 293210
  Synthetic oligonucleotide

SEQ ID NO: 660775 - DNA, 57 bp, Artificial; identical to SEQ ID NO: 296582
  Synthetic oligonucleotide

SEQ ID NO: 660776 - DNA, 51 bp, Artificial; identical to SEQ ID NO: 294752
  Synthetic oligonucleotide

SEQ ID NO: 660777 - DNA, 55 bp, Artificial; identical to SEQ ID NO: 290244
  Synthetic oligonucleotide

SEQ ID NO: 660778 - DNA, 55 bp, Artificial; identical to SEQ ID NO: 290243
  Synthetic oligonucleotide

SEQ ID NO: 660779 - DNA, 55 bp, Artificial; identical to SEQ ID NO: 290242
  Synthetic oligonucleotide

SEQ ID NO: 660780 - DNA, 50 bp, Artificial; identical to SEQ ID NO: 296025
  Synthetic oligonucleotide

SEQ ID NO: 660781 - DNA, 55 bp, Artificial; identical to SEQ ID NO: 290241
  Synthetic oligonucleotide

SEQ ID NO: 660782 - DNA, 55 bp, Artificial; identical to SEQ ID NO: 290240
  Synthetic oligonucleotide

SEQ ID NO: 660783 - DNA, 60 bp, Artificial; identical to SEQ ID NO: 293837
  Synthetic oligonucleotide

SEQ ID NO: 660784 - DNA, 55 bp, Artificial; identical to SEQ ID NO: 290239
  Synthetic oligonucleotide

SEQ ID NO: 660785 - DNA, 55 bp, Artificial; identical to SEQ ID NO: 290237
  Synthetic oligonucleotide

SEQ ID NO: 660786 - DNA, 53 bp, Artificial; identical to SEQ ID NO: 290236
  Synthetic oligonucleotide

SEQ ID NO: 660787 - DNA, 58 bp, Artificial; identical to SEQ ID NO: 295837
  Synthetic oligonucleotide

SEQ ID NO: 660788 - DNA, 60 bp, Artificial; identical to SEQ ID NO: 293360
  Synthetic oligonucleotide

SEQ ID NO: 660789 - DNA, 55 bp, Artificial; identical to SEQ ID NO: 290290
  Synthetic oligonucleotide

SEQ ID NO: 660790 - DNA, 52 bp, Artificial; identical to SEQ ID NO: 294152
  Synthetic oligonucleotide

SEQ ID NO: 660791 - DNA, 55 bp, Artificial; identical to SEQ ID NO: 290296
  Synthetic oligonucleotide

SEQ ID NO: 660792 - DNA, 55 bp, Artificial; identical to SEQ ID NO: 290297
  Synthetic oligonucleotide

SEQ ID NO: 660793 - DNA, 55 bp, Artificial; identical to SEQ ID NO: 290298
  Synthetic oligonucleotide

SEQ ID NO: 660794 - DNA, 53 bp, Artificial; identical to SEQ ID NO: 293718
  Synthetic oligonucleotide

SEQ ID NO: 660795 - DNA, 60 bp, Artificial; identical to SEQ ID NO: 294183
  Synthetic oligonucleotide

SEQ ID NO: 660796 - DNA, 53 bp, Artificial; identical to SEQ ID NO: 293717
  Synthetic oligonucleotide

SEQ ID NO: 660797 - DNA, 55 bp, Artificial; identical to SEQ ID NO: 290301
  Synthetic oligonucleotide

SEQ ID NO: 660798 - DNA, 52 bp, Artificial; identical to SEQ ID NO: 294151
  Synthetic oligonucleotide

SEQ ID NO: 660799 - DNA, 55 bp, Artificial; identical to SEQ ID NO: 290303
  Synthetic oligonucleotide

SEQ ID NO: 660800 - DNA, 55 bp, Artificial; identical to SEQ ID NO: 290304
  Synthetic oligonucleotide

SEQ ID NO: 660801 - DNA, 54 bp, Artificial; identical to SEQ ID NO: 293239
  Synthetic oligonucleotide

SEQ ID NO: 660802 - DNA, 55 bp, Artificial; identical to SEQ ID NO: 290306
  Synthetic oligonucleotide

SEQ ID NO: 660803 - DNA, 55 bp, Artificial; identical to SEQ ID NO: 290307
  Synthetic oligonucleotide

SEQ ID NO: 660804 - DNA, 55 bp, Artificial; identical to SEQ ID NO: 290308
  Synthetic oligonucleotide

SEQ ID NO: 660805 - DNA, 55 bp, Artificial; identical to SEQ ID NO: 290289
  Synthetic oligonucleotide

SEQ ID NO: 660806 - DNA, 55 bp, Artificial; identical to SEQ ID NO: 290288
  Synthetic oligonucleotide

SEQ ID NO: 660807 - DNA, 55 bp, Artificial; identical to SEQ ID NO: 290287
  Synthetic oligonucleotide

SEQ ID NO: 660808 - DNA, 54 bp, Artificial; identical to SEQ ID NO: 293234
  Synthetic oligonucleotide

SEQ ID NO: 660809 - DNA, 51 bp, Artificial; identical to SEQ ID NO: 294670
  Synthetic oligonucleotide

SEQ ID NO: 660810 - DNA, 55 bp, Artificial; identical to SEQ ID NO: 290284
  Synthetic oligonucleotide

SEQ ID NO: 660811 - DNA, 55 bp, Artificial; identical to SEQ ID NO: 290283
  Synthetic oligonucleotide

SEQ ID NO: 660812 - DNA, 55 bp, Artificial; identical to SEQ ID NO: 290281
  Synthetic oligonucleotide

SEQ ID NO: 660813 - DNA, 55 bp, Artificial; identical to SEQ ID NO: 290280
  Synthetic oligonucleotide

SEQ ID NO: 660814 - DNA, 55 bp, Artificial; identical to SEQ ID NO: 290279
  Synthetic oligonucleotide

SEQ ID NO: 660815 - DNA, 60 bp, Artificial; identical to SEQ ID NO: 292405
  Synthetic oligonucleotide

SEQ ID NO: 660816 - DNA, 54 bp, Artificial; identical to SEQ ID NO: 293229
  Synthetic oligonucleotide

SEQ ID NO: 660817 - DNA, 55 bp, Artificial; identical to SEQ ID NO: 290184
  Synthetic oligonucleotide

SEQ ID NO: 660818 - DNA, 51 bp, Artificial; identical to SEQ ID NO: 294657
  Synthetic oligonucleotide

SEQ ID NO: 660819 - DNA, 50 bp, Artificial; identical to SEQ ID NO: 296364
  Synthetic oligonucleotide

SEQ ID NO: 660820 - DNA, 55 bp, Artificial; identical to SEQ ID NO: 290187
  Synthetic oligonucleotide

SEQ ID NO: 660821 - DNA, 55 bp, Artificial; identical to SEQ ID NO: 290188
  Synthetic oligonucleotide

SEQ ID NO: 660822 - DNA, 55 bp, Artificial; identical to SEQ ID NO: 290191
  Synthetic oligonucleotide

SEQ ID NO: 660823 - DNA, 55 bp, Artificial; identical to SEQ ID NO: 290193
  Synthetic oligonucleotide

SEQ ID NO: 660824 - DNA, 53 bp, Artificial; identical to SEQ ID NO: 293725
  Synthetic oligonucleotide

SEQ ID NO: 660825 - DNA, 55 bp, Artificial; identical to SEQ ID NO: 290195
  Synthetic oligonucleotide

SEQ ID NO: 660826 - DNA, 59 bp, Artificial; identical to SEQ ID NO: 292905
  Synthetic oligonucleotide

SEQ ID NO: 660827 - DNA, 59 bp, Artificial; identical to SEQ ID NO: 292938
  Synthetic oligonucleotide

SEQ ID NO: 660828 - DNA, 52 bp, Artificial; identical to SEQ ID NO: 293939
  Synthetic oligonucleotide

SEQ ID NO: 660829 - DNA, 55 bp, Artificial; identical to SEQ ID NO: 290198
  Synthetic oligonucleotide

SEQ ID NO: 660830 - DNA, 55 bp, Artificial; identical to SEQ ID NO: 290200
  Synthetic oligonucleotide

SEQ ID NO: 660831 - DNA, 55 bp, Artificial; identical to SEQ ID NO: 290181
  Synthetic oligonucleotide

SEQ ID NO: 660832 - DNA, 59 bp, Artificial; identical to SEQ ID NO: 293038
  Synthetic oligonucleotide

SEQ ID NO: 660833 - DNA, 55 bp, Artificial; identical to SEQ ID NO: 290180
  Synthetic oligonucleotide

SEQ ID NO: 660834 - DNA, 54 bp, Artificial; identical to SEQ ID NO: 293224
  Synthetic oligonucleotide

SEQ ID NO: 660835 - DNA, 59 bp, Artificial; identical to SEQ ID NO: 295015
  Synthetic oligonucleotide

SEQ ID NO: 660836 - DNA, 57 bp, Artificial; identical to SEQ ID NO: 293183
  Synthetic oligonucleotide

SEQ ID NO: 660837 - DNA, 51 bp, Artificial; identical to SEQ ID NO: 294687
  Synthetic oligonucleotide

SEQ ID NO: 660838 - DNA, 60 bp, Artificial; identical to SEQ ID NO: 293227
  Synthetic oligonucleotide

SEQ ID NO: 660839 - DNA, 55 bp, Artificial; identical to SEQ ID NO: 290176
  Synthetic oligonucleotide

SEQ ID NO: 660840 - DNA, 55 bp, Artificial; identical to SEQ ID NO: 290175
  Synthetic oligonucleotide

SEQ ID NO: 660841 - DNA, 55 bp, Artificial; identical to SEQ ID NO: 290172
  Synthetic oligonucleotide

SEQ ID NO: 660842 - DNA, 55 bp, Artificial; identical to SEQ ID NO: 290169
  Synthetic oligonucleotide

SEQ ID NO: 660843 - DNA, 55 bp, Artificial; identical to SEQ ID NO: 290168
  Synthetic oligonucleotide

SEQ ID NO: 660844 - DNA, 51 bp, Artificial; identical to SEQ ID NO: 294447
  Synthetic oligonucleotide

SEQ ID NO: 660845 - DNA, 60 bp, Artificial; identical to SEQ ID NO: 292749
  Synthetic oligonucleotide

SEQ ID NO: 660846 - DNA, 55 bp, Artificial; identical to SEQ ID NO: 290221
  Synthetic oligonucleotide

SEQ ID NO: 660847 - DNA, 52 bp, Artificial; identical to SEQ ID NO: 293950
  Synthetic oligonucleotide

SEQ ID NO: 660848 - DNA, 52 bp, Artificial; identical to SEQ ID NO: 293951
  Synthetic oligonucleotide

SEQ ID NO: 660849 - DNA, 50 bp, Artificial; identical to SEQ ID NO: 296209
  Synthetic oligonucleotide

SEQ ID NO: 660850 - DNA, 60 bp, Artificial; identical to SEQ ID NO: 292872
  Synthetic oligonucleotide

SEQ ID NO: 660851 - DNA, 52 bp, Artificial; identical to SEQ ID NO: 293953
  Synthetic oligonucleotide

SEQ ID NO: 660852 - DNA, 55 bp, Artificial; identical to SEQ ID NO: 290229
  Synthetic oligonucleotide

SEQ ID NO: 660853 - DNA, 54 bp, Artificial; identical to SEQ ID NO: 293173
  Synthetic oligonucleotide

SEQ ID NO: 660854 - DNA, 54 bp, Artificial; identical to SEQ ID NO: 293170
  Synthetic oligonucleotide

SEQ ID NO: 660855 - DNA, 55 bp, Artificial; identical to SEQ ID NO: 290231
  Synthetic oligonucleotide

SEQ ID NO: 660856 - DNA, 55 bp, Artificial; identical to SEQ ID NO: 290234
  Synthetic oligonucleotide

SEQ ID NO: 660857 - DNA, 55 bp, Artificial; identical to SEQ ID NO: 290235
  Synthetic oligonucleotide

SEQ ID NO: 660858 - DNA, 55 bp, Artificial; identical to SEQ ID NO: 290217
  Synthetic oligonucleotide

SEQ ID NO: 660859 - DNA, 50 bp, Artificial; identical to SEQ ID NO: 292793
  Synthetic oligonucleotide

SEQ ID NO: 660860 - DNA, 54 bp, Artificial; identical to SEQ ID NO: 293169
  Synthetic oligonucleotide

SEQ ID NO: 660861 - DNA, 51 bp, Artificial; identical to SEQ ID NO: 294529
  Synthetic oligonucleotide

SEQ ID NO: 660862 - DNA, 50 bp, Artificial; identical to SEQ ID NO: 296177
  Synthetic oligonucleotide

SEQ ID NO: 660863 - DNA, 55 bp, Artificial; identical to SEQ ID NO: 290215
  Synthetic oligonucleotide

SEQ ID NO: 660864 - DNA, 55 bp, Artificial; identical to SEQ ID NO: 290213
  Synthetic oligonucleotide

SEQ ID NO: 660865 - DNA, 55 bp, Artificial; identical to SEQ ID NO: 290211
  Synthetic oligonucleotide

SEQ ID NO: 660866 - DNA, 55 bp, Artificial; identical to SEQ ID NO: 290209
  Synthetic oligonucleotide

SEQ ID NO: 660867 - DNA, 52 bp, Artificial; identical to SEQ ID NO: 294010
  Synthetic oligonucleotide

SEQ ID NO: 660868 - DNA, 55 bp, Artificial; identical to SEQ ID NO: 290207
  Synthetic oligonucleotide

SEQ ID NO: 660869 - DNA, 52 bp, Artificial; identical to SEQ ID NO: 294009
  Synthetic oligonucleotide

SEQ ID NO: 660870 - DNA, 52 bp, Artificial; identical to SEQ ID NO: 294008
  Synthetic oligonucleotide

SEQ ID NO: 660871 - DNA, 57 bp, Artificial; identical to SEQ ID NO: 292715
  Synthetic oligonucleotide

SEQ ID NO: 660872 - DNA, 55 bp, Artificial; identical to SEQ ID NO: 290204
  Synthetic oligonucleotide

SEQ ID NO: 660873 - DNA, 55 bp, Artificial; identical to SEQ ID NO: 290202
  Synthetic oligonucleotide

SEQ ID NO: 660874 - DNA, 50 bp, Artificial; identical to SEQ ID NO: 296255
  Synthetic oligonucleotide

SEQ ID NO: 660875 - DNA, 55 bp, Artificial; identical to SEQ ID NO: 289829
  Synthetic oligonucleotide

SEQ ID NO: 660876 - DNA, 51 bp, Artificial; identical to SEQ ID NO: 294501
  Synthetic oligonucleotide

SEQ ID NO: 660877 - DNA, 55 bp, Artificial; identical to SEQ ID NO: 289830
  Synthetic oligonucleotide

SEQ ID NO: 660878 - DNA, 60 bp, Artificial; identical to SEQ ID NO: 292627
  Synthetic oligonucleotide

SEQ ID NO: 660879 - DNA, 55 bp, Artificial; identical to SEQ ID NO: 289831
  Synthetic oligonucleotide

SEQ ID NO: 660880 - DNA, 55 bp, Artificial; identical to SEQ ID NO: 289832
  Synthetic oligonucleotide

SEQ ID NO: 660881 - DNA, 55 bp, Artificial; identical to SEQ ID NO: 289833
  Synthetic oligonucleotide

SEQ ID NO: 660882 - DNA, 54 bp, Artificial; identical to SEQ ID NO: 289835
  Synthetic oligonucleotide

SEQ ID NO: 660883 - DNA, 50 bp, Artificial; identical to SEQ ID NO: 296218
  Synthetic oligonucleotide

SEQ ID NO: 660884 - DNA, 60 bp, Artificial; identical to SEQ ID NO: 292560
  Synthetic oligonucleotide

SEQ ID NO: 660885 - DNA, 55 bp, Artificial; identical to SEQ ID NO: 289844
  Synthetic oligonucleotide

SEQ ID NO: 660886 - DNA, 51 bp, Artificial; identical to SEQ ID NO: 294446
  Synthetic oligonucleotide

SEQ ID NO: 660887 - DNA, 55 bp, Artificial; identical to SEQ ID NO: 289826
  Synthetic oligonucleotide

SEQ ID NO: 660888 - DNA, 52 bp, Artificial; identical to SEQ ID NO: 294024
  Synthetic oligonucleotide

SEQ ID NO: 660889 - DNA, 55 bp, Artificial; identical to SEQ ID NO: 289825
  Synthetic oligonucleotide

SEQ ID NO: 660890 - DNA, 55 bp, Artificial; identical to SEQ ID NO: 289824
  Synthetic oligonucleotide

SEQ ID NO: 660891 - DNA, 55 bp, Artificial; identical to SEQ ID NO: 289823
  Synthetic oligonucleotide

SEQ ID NO: 660892 - DNA, 55 bp, Artificial; identical to SEQ ID NO: 289822
  Synthetic oligonucleotide

SEQ ID NO: 660893 - DNA, 55 bp, Artificial; identical to SEQ ID NO: 289821
  Synthetic oligonucleotide

SEQ ID NO: 660894 - DNA, 55 bp, Artificial; identical to SEQ ID NO: 289820
  Synthetic oligonucleotide

SEQ ID NO: 660895 - DNA, 51 bp, Artificial; identical to SEQ ID NO: 294540
  Synthetic oligonucleotide

SEQ ID NO: 660896 - DNA, 55 bp, Artificial; identical to SEQ ID NO: 289819
  Synthetic oligonucleotide

SEQ ID NO: 660897 - DNA, 55 bp, Artificial; identical to SEQ ID NO: 289818
  Synthetic oligonucleotide

SEQ ID NO: 660898 - DNA, 55 bp, Artificial; identical to SEQ ID NO: 289817
  Synthetic oligonucleotide

SEQ ID NO: 660899 - DNA, 60 bp, Artificial; identical to SEQ ID NO: 293116
  Synthetic oligonucleotide

SEQ ID NO: 660900 - DNA, 50 bp, Artificial; identical to SEQ ID NO: 295663
  Synthetic oligonucleotide

SEQ ID NO: 660901 - DNA, 50 bp, Artificial; identical to SEQ ID NO: 295664
  Synthetic oligonucleotide

SEQ ID NO: 660902 - DNA, 50 bp, Artificial; identical to SEQ ID NO: 295665
  Synthetic oligonucleotide

SEQ ID NO: 660903 - DNA, 55 bp, Artificial; identical to SEQ ID NO: 289812
  Synthetic oligonucleotide

SEQ ID NO: 660904 - DNA, 55 bp, Artificial; identical to SEQ ID NO: 289811
  Synthetic oligonucleotide

SEQ ID NO: 660905 - DNA, 54 bp, Artificial; identical to SEQ ID NO: 293083
  Synthetic oligonucleotide

SEQ ID NO: 660906 - DNA, 54 bp, Artificial; identical to SEQ ID NO: 293192
  Synthetic oligonucleotide

SEQ ID NO: 660907 - DNA, 55 bp, Artificial; identical to SEQ ID NO: 289865
  Synthetic oligonucleotide

SEQ ID NO: 660908 - DNA, 60 bp, Artificial; identical to SEQ ID NO: 292972
  Synthetic oligonucleotide

SEQ ID NO: 660909 - DNA, 54 bp, Artificial; identical to SEQ ID NO: 293188
  Synthetic oligonucleotide

SEQ ID NO: 660910 - DNA, 55 bp, Artificial; identical to SEQ ID NO: 289868
  Synthetic oligonucleotide

SEQ ID NO: 660911 - DNA, 50 bp, Artificial; identical to SEQ ID NO: 295632
  Synthetic oligonucleotide

SEQ ID NO: 660912 - DNA, 55 bp, Artificial; identical to SEQ ID NO: 289869
  Synthetic oligonucleotide

SEQ ID NO: 660913 - DNA, 55 bp, Artificial; identical to SEQ ID NO: 289870
  Synthetic oligonucleotide

SEQ ID NO: 660914 - DNA, 57 bp, Artificial; identical to SEQ ID NO: 292894
  Synthetic oligonucleotide

SEQ ID NO: 660915 - DNA, 55 bp, Artificial; identical to SEQ ID NO: 289871
  Synthetic oligonucleotide

SEQ ID NO: 660916 - DNA, 52 bp, Artificial; identical to SEQ ID NO: 294019
  Synthetic oligonucleotide

SEQ ID NO: 660917 - DNA, 55 bp, Artificial; identical to SEQ ID NO: 289874
  Synthetic oligonucleotide

SEQ ID NO: 660918 - DNA, 55 bp, Artificial; identical to SEQ ID NO: 289875
  Synthetic oligonucleotide

SEQ ID NO: 660919 - DNA, 53 bp, Artificial; identical to SEQ ID NO: 293646
  Synthetic oligonucleotide

SEQ ID NO: 660920 - DNA, 55 bp, Artificial; identical to SEQ ID NO: 289878
  Synthetic oligonucleotide

SEQ ID NO: 660921 - DNA, 55 bp, Artificial; identical to SEQ ID NO: 289879
  Synthetic oligonucleotide

SEQ ID NO: 660922 - DNA, 55 bp, Artificial; identical to SEQ ID NO: 289880
  Synthetic oligonucleotide

SEQ ID NO: 660923 - DNA, 58 bp, Artificial; identical to SEQ ID NO: 292149
  Synthetic oligonucleotide

SEQ ID NO: 660924 - DNA, 54 bp, Artificial; identical to SEQ ID NO: 292138
  Synthetic oligonucleotide

SEQ ID NO: 660925 - DNA, 60 bp, Artificial; identical to SEQ ID NO: 292127
  Synthetic oligonucleotide

SEQ ID NO: 660926 - DNA, 55 bp, Artificial; identical to SEQ ID NO: 289863
  Synthetic oligonucleotide

SEQ ID NO: 660927 - DNA, 53 bp, Artificial; identical to SEQ ID NO: 293617
  Synthetic oligonucleotide

SEQ ID NO: 660928 - DNA, 55 bp, Artificial; identical to SEQ ID NO: 292105
  Synthetic oligonucleotide

SEQ ID NO: 660929 - DNA, 52 bp, Artificial; identical to SEQ ID NO: 293971
  Synthetic oligonucleotide

SEQ ID NO: 660930 - DNA, 55 bp, Artificial; identical to SEQ ID NO: 289862
  Synthetic oligonucleotide

SEQ ID NO: 660931 - DNA, 52 bp, Artificial; identical to SEQ ID NO: 293968
  Synthetic oligonucleotide

SEQ ID NO: 660932 - DNA, 52 bp, Artificial; identical to SEQ ID NO: 293966
  Synthetic oligonucleotide

SEQ ID NO: 660933 - DNA, 55 bp, Artificial; identical to SEQ ID NO: 289858
  Synthetic oligonucleotide

SEQ ID NO: 660934 - DNA, 55 bp, Artificial; identical to SEQ ID NO: 289857
  Synthetic oligonucleotide

SEQ ID NO: 660935 - DNA, 55 bp, Artificial; identical to SEQ ID NO: 289856
  Synthetic oligonucleotide

SEQ ID NO: 660936 - DNA, 55 bp, Artificial; identical to SEQ ID NO: 289855
  Synthetic oligonucleotide

SEQ ID NO: 660937 - DNA, 55 bp, Artificial; identical to SEQ ID NO: 289854
  Synthetic oligonucleotide

SEQ ID NO: 660938 - DNA, 60 bp, Artificial; identical to SEQ ID NO: 292049
  Synthetic oligonucleotide

SEQ ID NO: 660939 - DNA, 55 bp, Artificial; identical to SEQ ID NO: 289852
  Synthetic oligonucleotide

SEQ ID NO: 660940 - DNA, 55 bp, Artificial; identical to SEQ ID NO: 292016
  Synthetic oligonucleotide

SEQ ID NO: 660941 - DNA, 50 bp, Artificial; identical to SEQ ID NO: 295684
  Synthetic oligonucleotide

SEQ ID NO: 660942 - DNA, 55 bp, Artificial; identical to SEQ ID NO: 289846
  Synthetic oligonucleotide

SEQ ID NO: 660943 - DNA, 55 bp, Artificial; identical to SEQ ID NO: 289845
  Synthetic oligonucleotide

SEQ ID NO: 660944 - DNA, 55 bp, Artificial; identical to SEQ ID NO: 289774
  Synthetic oligonucleotide

SEQ ID NO: 660945 - DNA, 51 bp, Artificial; identical to SEQ ID NO: 294890
  Synthetic oligonucleotide

SEQ ID NO: 660946 - DNA, 54 bp, Artificial; identical to SEQ ID NO: 293304
  Synthetic oligonucleotide

SEQ ID NO: 660947 - DNA, 51 bp, Artificial; identical to SEQ ID NO: 294900
  Synthetic oligonucleotide

SEQ ID NO: 660948 - DNA, 54 bp, Artificial; identical to SEQ ID NO: 289766
  Synthetic oligonucleotide

SEQ ID NO: 660949 - DNA, 53 bp, Artificial; identical to SEQ ID NO: 291994
  Synthetic oligonucleotide

SEQ ID NO: 660950 - DNA, 51 bp, Artificial; identical to SEQ ID NO: 294998
  Synthetic oligonucleotide

SEQ ID NO: 660951 - DNA, 55 bp, Artificial; identical to SEQ ID NO: 289764
  Synthetic oligonucleotide

SEQ ID NO: 660952 - DNA, 55 bp, Artificial; identical to SEQ ID NO: 289763
  Synthetic oligonucleotide

SEQ ID NO: 660953 - DNA, 54 bp, Artificial; identical to SEQ ID NO: 293298
  Synthetic oligonucleotide

SEQ ID NO: 660954 - DNA, 55 bp, Artificial; identical to SEQ ID NO: 289759
  Synthetic oligonucleotide

SEQ ID NO: 660955 - DNA, 55 bp, Artificial; identical to SEQ ID NO: 289758
  Synthetic oligonucleotide

SEQ ID NO: 660956 - DNA, 60 bp, Artificial; identical to SEQ ID NO: 291905
  Synthetic oligonucleotide

SEQ ID NO: 660957 - DNA, 50 bp, Artificial; identical to SEQ ID NO: 295566
  Synthetic oligonucleotide

SEQ ID NO: 660958 - DNA, 55 bp, Artificial; identical to SEQ ID NO: 289753
  Synthetic oligonucleotide

SEQ ID NO: 660959 - DNA, 58 bp, Artificial; identical to SEQ ID NO: 295393
  Synthetic oligonucleotide

SEQ ID NO: 660960 - DNA, 58 bp, Artificial; identical to SEQ ID NO: 292493
  Synthetic oligonucleotide

SEQ ID NO: 660961 - DNA, 55 bp, Artificial; identical to SEQ ID NO: 289747
  Synthetic oligonucleotide

SEQ ID NO: 660962 - DNA, 55 bp, Artificial; identical to SEQ ID NO: 289745
  Synthetic oligonucleotide

SEQ ID NO: 660963 - DNA, 55 bp, Artificial; identical to SEQ ID NO: 289743
  Synthetic oligonucleotide

SEQ ID NO: 660964 - DNA, 52 bp, Artificial; identical to SEQ ID NO: 293975
  Synthetic oligonucleotide

SEQ ID NO: 660965 - DNA, 51 bp, Artificial; identical to SEQ ID NO: 292449
  Synthetic oligonucleotide

SEQ ID NO: 660966 - DNA, 54 bp, Artificial; identical to SEQ ID NO: 292438
  Synthetic oligonucleotide

SEQ ID NO: 660967 - DNA, 57 bp, Artificial; identical to SEQ ID NO: 296004
  Synthetic oligonucleotide

SEQ ID NO: 660968 - DNA, 55 bp, Artificial; identical to SEQ ID NO: 289791
  Synthetic oligonucleotide

SEQ ID NO: 660969 - DNA, 55 bp, Artificial; identical to SEQ ID NO: 289792
  Synthetic oligonucleotide

SEQ ID NO: 660970 - DNA, 55 bp, Artificial; identical to SEQ ID NO: 289793
  Synthetic oligonucleotide

SEQ ID NO: 660971 - DNA, 52 bp, Artificial; identical to SEQ ID NO: 293981
  Synthetic oligonucleotide

SEQ ID NO: 660972 - DNA, 55 bp, Artificial; identical to SEQ ID NO: 289796
  Synthetic oligonucleotide

SEQ ID NO: 660973 - DNA, 54 bp, Artificial; identical to SEQ ID NO: 293287
  Synthetic oligonucleotide

SEQ ID NO: 660974 - DNA, 53 bp, Artificial; identical to SEQ ID NO: 289798
  Synthetic oligonucleotide

SEQ ID NO: 660975 - DNA, 55 bp, Artificial; identical to SEQ ID NO: 289801
  Synthetic oligonucleotide

SEQ ID NO: 660976 - DNA, 52 bp, Artificial; identical to SEQ ID NO: 289802
  Synthetic oligonucleotide

SEQ ID NO: 660977 - DNA, 55 bp, Artificial; identical to SEQ ID NO: 289803
  Synthetic oligonucleotide

SEQ ID NO: 660978 - DNA, 55 bp, Artificial; identical to SEQ ID NO: 289804
  Synthetic oligonucleotide

SEQ ID NO: 660979 - DNA, 55 bp, Artificial; identical to SEQ ID NO: 289806
  Synthetic oligonucleotide

SEQ ID NO: 660980 - DNA, 55 bp, Artificial; identical to SEQ ID NO: 289807
  Synthetic oligonucleotide

SEQ ID NO: 660981 - DNA, 60 bp, Artificial; identical to SEQ ID NO: 292294
  Synthetic oligonucleotide

SEQ ID NO: 660982 - DNA, 54 bp, Artificial; identical to SEQ ID NO: 292282
  Synthetic oligonucleotide

SEQ ID NO: 660983 - DNA, 52 bp, Artificial; identical to SEQ ID NO: 293990
  Synthetic oligonucleotide

SEQ ID NO: 660984 - DNA, 60 bp, Artificial; identical to SEQ ID NO: 292260
  Synthetic oligonucleotide

SEQ ID NO: 660985 - DNA, 52 bp, Artificial; identical to SEQ ID NO: 289788
  Synthetic oligonucleotide

SEQ ID NO: 660986 - DNA, 55 bp, Artificial; identical to SEQ ID NO: 289787
  Synthetic oligonucleotide

SEQ ID NO: 660987 - DNA, 51 bp, Artificial; identical to SEQ ID NO: 289786
  Synthetic oligonucleotide

SEQ ID NO: 660988 - DNA, 48 bp, Artificial; identical to SEQ ID NO: 289784
  Synthetic oligonucleotide

SEQ ID NO: 660989 - DNA, 52 bp, Artificial; identical to SEQ ID NO: 293954
  Synthetic oligonucleotide

SEQ ID NO: 660990 - DNA, 59 bp, Artificial; identical to SEQ ID NO: 294138
  Synthetic oligonucleotide

SEQ ID NO: 660991 - DNA, 51 bp, Artificial; identical to SEQ ID NO: 294878
  Synthetic oligonucleotide

SEQ ID NO: 660992 - DNA, 56 bp, Artificial; identical to SEQ ID NO: 294393
  Synthetic oligonucleotide

SEQ ID NO: 660993 - DNA, 51 bp, Artificial; identical to SEQ ID NO: 294816
  Synthetic oligonucleotide

SEQ ID NO: 660994 - DNA, 54 bp, Artificial; identical to SEQ ID NO: 293325
  Synthetic oligonucleotide

SEQ ID NO: 660995 - DNA, 54 bp, Artificial; identical to SEQ ID NO: 293324
  Synthetic oligonucleotide

SEQ ID NO: 660996 - DNA, 54 bp, Artificial; identical to SEQ ID NO: 293323
  Synthetic oligonucleotide

SEQ ID NO: 660997 - DNA, 60 bp, Artificial; identical to SEQ ID NO: 294116
  Synthetic oligonucleotide

SEQ ID NO: 660998 - DNA, 51 bp, Artificial; identical to SEQ ID NO: 294836
  Synthetic oligonucleotide

SEQ ID NO: 660999 - DNA, 53 bp, Artificial; identical to SEQ ID NO: 289777
  Synthetic oligonucleotide

SEQ ID NO: 661000 - DNA, 56 bp, Artificial; identical to SEQ ID NO: 294094
  Synthetic oligonucleotide

SEQ ID NO: 661001 - DNA, 54 bp, Artificial; identical to SEQ ID NO: 289776
  Synthetic oligonucleotide

SEQ ID NO: 661002 - DNA, 54 bp, Artificial; identical to SEQ ID NO: 294072
  Synthetic oligonucleotide

SEQ ID NO: 661003 - DNA, 54 bp, Artificial; identical to SEQ ID NO: 293322
  Synthetic oligonucleotide

SEQ ID NO: 661004 - DNA, 52 bp, Artificial; identical to SEQ ID NO: 293962
  Synthetic oligonucleotide

SEQ ID NO: 661005 - DNA, 57 bp, Artificial; identical to SEQ ID NO: 294060
  Synthetic oligonucleotide

SEQ ID NO: 661006 - DNA, 55 bp, Artificial; identical to SEQ ID NO: 289775
  Synthetic oligonucleotide

SEQ ID NO: 661007 - DNA, 55 bp, Artificial; identical to SEQ ID NO: 289971
  Synthetic oligonucleotide

SEQ ID NO: 661008 - DNA, 53 bp, Artificial; identical to SEQ ID NO: 293898
  Synthetic oligonucleotide

SEQ ID NO: 661009 - DNA, 57 bp, Artificial; identical to SEQ ID NO: 296760
  Synthetic oligonucleotide

SEQ ID NO: 661010 - DNA, 51 bp, Artificial; identical to SEQ ID NO: 295007
  Synthetic oligonucleotide

SEQ ID NO: 661011 - DNA, 51 bp, Artificial; identical to SEQ ID NO: 294990
  Synthetic oligonucleotide

SEQ ID NO: 661012 - DNA, 55 bp, Artificial; identical to SEQ ID NO: 289984
  Synthetic oligonucleotide

SEQ ID NO: 661013 - DNA, 55 bp, Artificial; identical to SEQ ID NO: 289985
  Synthetic oligonucleotide

SEQ ID NO: 661014 - DNA, 56 bp, Artificial; identical to SEQ ID NO: 293994
  Synthetic oligonucleotide

SEQ ID NO: 661015 - DNA, 55 bp, Artificial; identical to SEQ ID NO: 289987
  Synthetic oligonucleotide

SEQ ID NO: 661016 - DNA, 53 bp, Artificial; identical to SEQ ID NO: 293809
  Synthetic oligonucleotide

SEQ ID NO: 661017 - DNA, 55 bp, Artificial; identical to SEQ ID NO: 289968
  Synthetic oligonucleotide

SEQ ID NO: 661018 - DNA, 55 bp, Artificial; identical to SEQ ID NO: 289966
  Synthetic oligonucleotide

SEQ ID NO: 661019 - DNA, 55 bp, Artificial; identical to SEQ ID NO: 289963
  Synthetic oligonucleotide

SEQ ID NO: 661020 - DNA, 60 bp, Artificial; identical to SEQ ID NO: 293904
  Synthetic oligonucleotide

SEQ ID NO: 661021 - DNA, 55 bp, Artificial; identical to SEQ ID NO: 289957
  Synthetic oligonucleotide

SEQ ID NO: 661022 - DNA, 55 bp, Artificial; identical to SEQ ID NO: 289955
  Synthetic oligonucleotide

SEQ ID NO: 661023 - DNA, 52 bp, Artificial; identical to SEQ ID NO: 289954
  Synthetic oligonucleotide

SEQ ID NO: 661024 - DNA, 55 bp, Artificial; identical to SEQ ID NO: 289953
  Synthetic oligonucleotide

SEQ ID NO: 661025 - DNA, 57 bp, Artificial; identical to SEQ ID NO: 294160
  Synthetic oligonucleotide

SEQ ID NO: 661026 - DNA, 55 bp, Artificial; identical to SEQ ID NO: 290014
  Synthetic oligonucleotide

SEQ ID NO: 661027 - DNA, 54 bp, Artificial; identical to SEQ ID NO: 290015
  Synthetic oligonucleotide

SEQ ID NO: 661028 - DNA, 55 bp, Artificial; identical to SEQ ID NO: 290017
  Synthetic oligonucleotide

SEQ ID NO: 661029 - DNA, 51 bp, Artificial; identical to SEQ ID NO: 294964
  Synthetic oligonucleotide

SEQ ID NO: 661030 - DNA, 54 bp, Artificial; identical to SEQ ID NO: 293306
  Synthetic oligonucleotide

SEQ ID NO: 661031 - DNA, 53 bp, Artificial; identical to SEQ ID NO: 294149
  Synthetic oligonucleotide

SEQ ID NO: 661032 - DNA, 55 bp, Artificial; identical to SEQ ID NO: 290018
  Synthetic oligonucleotide

SEQ ID NO: 661033 - DNA, 55 bp, Artificial; identical to SEQ ID NO: 290019
  Synthetic oligonucleotide

SEQ ID NO: 661034 - DNA, 55 bp, Artificial; identical to SEQ ID NO: 290021
  Synthetic oligonucleotide

SEQ ID NO: 661035 - DNA, 50 bp, Artificial; identical to SEQ ID NO: 295941
  Synthetic oligonucleotide

SEQ ID NO: 661036 - DNA, 55 bp, Artificial; identical to SEQ ID NO: 290022
  Synthetic oligonucleotide

SEQ ID NO: 661037 - DNA, 54 bp, Artificial; identical to SEQ ID NO: 293259
  Synthetic oligonucleotide

SEQ ID NO: 661038 - DNA, 55 bp, Artificial; identical to SEQ ID NO: 290023
  Synthetic oligonucleotide

SEQ ID NO: 661039 - DNA, 55 bp, Artificial; identical to SEQ ID NO: 293516
  Synthetic oligonucleotide

SEQ ID NO: 661040 - DNA, 55 bp, Artificial; identical to SEQ ID NO: 290025
  Synthetic oligonucleotide

SEQ ID NO: 661041 - DNA, 50 bp, Artificial; identical to SEQ ID NO: 295898
  Synthetic oligonucleotide

SEQ ID NO: 661042 - DNA, 51 bp, Artificial; identical to SEQ ID NO: 294923
  Synthetic oligonucleotide

SEQ ID NO: 661043 - DNA, 51 bp, Artificial; identical to SEQ ID NO: 293493
  Synthetic oligonucleotide

SEQ ID NO: 661044 - DNA, 54 bp, Artificial; identical to SEQ ID NO: 290006
  Synthetic oligonucleotide

SEQ ID NO: 661045 - DNA, 54 bp, Artificial; identical to SEQ ID NO: 293257
  Synthetic oligonucleotide

SEQ ID NO: 661046 - DNA, 55 bp, Artificial; identical to SEQ ID NO: 290004
  Synthetic oligonucleotide

SEQ ID NO: 661047 - DNA, 55 bp, Artificial; identical to SEQ ID NO: 290001
  Synthetic oligonucleotide

SEQ ID NO: 661048 - DNA, 53 bp, Artificial; identical to SEQ ID NO: 293846
  Synthetic oligonucleotide

SEQ ID NO: 661049 - DNA, 55 bp, Artificial; identical to SEQ ID NO: 289998
  Synthetic oligonucleotide

SEQ ID NO: 661050 - DNA, 58 bp, Artificial; identical to SEQ ID NO: 295571
  Synthetic oligonucleotide

SEQ ID NO: 661051 - DNA, 53 bp, Artificial; identical to SEQ ID NO: 293820
  Synthetic oligonucleotide

SEQ ID NO: 661052 - DNA, 55 bp, Artificial; identical to SEQ ID NO: 289997
  Synthetic oligonucleotide

SEQ ID NO: 661053 - DNA, 55 bp, Artificial; identical to SEQ ID NO: 289992
  Synthetic oligonucleotide

SEQ ID NO: 661054 - DNA, 53 bp, Artificial; identical to SEQ ID NO: 293827
  Synthetic oligonucleotide

SEQ ID NO: 661055 - DNA, 58 bp, Artificial; identical to SEQ ID NO: 293449
  Synthetic oligonucleotide

SEQ ID NO: 661056 - DNA, 55 bp, Artificial; identical to SEQ ID NO: 289991
  Synthetic oligonucleotide

SEQ ID NO: 661057 - DNA, 51 bp, Artificial; identical to SEQ ID NO: 294789
  Synthetic oligonucleotide

SEQ ID NO: 661058 - DNA, 55 bp, Artificial; identical to SEQ ID NO: 289990
  Synthetic oligonucleotide

SEQ ID NO: 661059 - DNA, 55 bp, Artificial; identical to SEQ ID NO: 289914
  Synthetic oligonucleotide

SEQ ID NO: 661060 - DNA, 52 bp, Artificial; identical to SEQ ID NO: 293995
  Synthetic oligonucleotide

SEQ ID NO: 661061 - DNA, 60 bp, Artificial; identical to SEQ ID NO: 293405
  Synthetic oligonucleotide

SEQ ID NO: 661062 - DNA, 55 bp, Artificial; identical to SEQ ID NO: 289913
  Synthetic oligonucleotide

SEQ ID NO: 661063 - DNA, 52 bp, Artificial; identical to SEQ ID NO: 293996
  Synthetic oligonucleotide

SEQ ID NO: 661064 - DNA, 54 bp, Artificial; identical to SEQ ID NO: 293253
  Synthetic oligonucleotide

SEQ ID NO: 661065 - DNA, 54 bp, Artificial; identical to SEQ ID NO: 293251
  Synthetic oligonucleotide

SEQ ID NO: 661066 - DNA, 55 bp, Artificial; identical to SEQ ID NO: 289909
  Synthetic oligonucleotide

SEQ ID NO: 661067 - DNA, 55 bp, Artificial; identical to SEQ ID NO: 289908
  Synthetic oligonucleotide

SEQ ID NO: 661068 - DNA, 55 bp, Artificial; identical to SEQ ID NO: 289906
  Synthetic oligonucleotide

SEQ ID NO: 661069 - DNA, 55 bp, Artificial; identical to SEQ ID NO: 289902
  Synthetic oligonucleotide

SEQ ID NO: 661070 - DNA, 55 bp, Artificial; identical to SEQ ID NO: 289900
  Synthetic oligonucleotide

SEQ ID NO: 661071 - DNA, 55 bp, Artificial; identical to SEQ ID NO: 289897
  Synthetic oligonucleotide

SEQ ID NO: 661072 - DNA, 52 bp, Artificial; identical to SEQ ID NO: 294004
  Synthetic oligonucleotide

SEQ ID NO: 661073 - DNA, 55 bp, Artificial; identical to SEQ ID NO: 289893
  Synthetic oligonucleotide

SEQ ID NO: 661074 - DNA, 55 bp, Artificial; identical to SEQ ID NO: 289892
  Synthetic oligonucleotide

SEQ ID NO: 661075 - DNA, 55 bp, Artificial; identical to SEQ ID NO: 289890
  Synthetic oligonucleotide

SEQ ID NO: 661076 - DNA, 59 bp, Artificial; identical to SEQ ID NO: 293260
  Synthetic oligonucleotide

SEQ ID NO: 661077 - DNA, 55 bp, Artificial; identical to SEQ ID NO: 289887
  Synthetic oligonucleotide

SEQ ID NO: 661078 - DNA, 59 bp, Artificial; identical to SEQ ID NO: 293826
  Synthetic oligonucleotide

SEQ ID NO: 661079 - DNA, 52 bp, Artificial; identical to SEQ ID NO: 294007
  Synthetic oligonucleotide

SEQ ID NO: 661080 - DNA, 53 bp, Artificial; identical to SEQ ID NO: 293896
  Synthetic oligonucleotide

SEQ ID NO: 661081 - DNA, 57 bp, Artificial; identical to SEQ ID NO: 296371
  Synthetic oligonucleotide

SEQ ID NO: 661082 - DNA, 53 bp, Artificial; identical to SEQ ID NO: 293887
  Synthetic oligonucleotide

SEQ ID NO: 661083 - DNA, 51 bp, Artificial; identical to SEQ ID NO: 294767
  Synthetic oligonucleotide

SEQ ID NO: 661084 - DNA, 55 bp, Artificial; identical to SEQ ID NO: 289882
  Synthetic oligonucleotide

SEQ ID NO: 661085 - DNA, 55 bp, Artificial; identical to SEQ ID NO: 289934
  Synthetic oligonucleotide

SEQ ID NO: 661086 - DNA, 50 bp, Artificial; identical to SEQ ID NO: 295818
  Synthetic oligonucleotide

SEQ ID NO: 661087 - DNA, 55 bp, Artificial; identical to SEQ ID NO: 289936
  Synthetic oligonucleotide

SEQ ID NO: 661088 - DNA, 55 bp, Artificial; identical to SEQ ID NO: 289939
  Synthetic oligonucleotide

SEQ ID NO: 661089 - DNA, 60 bp, Artificial; identical to SEQ ID NO: 293782
  Synthetic oligonucleotide

SEQ ID NO: 661090 - DNA, 55 bp, Artificial; identical to SEQ ID NO: 289941
  Synthetic oligonucleotide

SEQ ID NO: 661091 - DNA, 55 bp, Artificial; identical to SEQ ID NO: 289942
  Synthetic oligonucleotide

SEQ ID NO: 661092 - DNA, 60 bp, Artificial; identical to SEQ ID NO: 293760
  Synthetic oligonucleotide

SEQ ID NO: 661093 - DNA, 47 bp, Artificial; identical to SEQ ID NO: 289943
  Synthetic oligonucleotide

SEQ ID NO: 661094 - DNA, 54 bp, Artificial; identical to SEQ ID NO: 293749
  Synthetic oligonucleotide

SEQ ID NO: 661095 - DNA, 55 bp, Artificial; identical to SEQ ID NO: 289944
  Synthetic oligonucleotide

SEQ ID NO: 661096 - DNA, 55 bp, Artificial; identical to SEQ ID NO: 289946
  Synthetic oligonucleotide

SEQ ID NO: 661097 - DNA, 52 bp, Artificial; identical to SEQ ID NO: 293952
  Synthetic oligonucleotide

SEQ ID NO: 661098 - DNA, 55 bp, Artificial; identical to SEQ ID NO: 289948
  Synthetic oligonucleotide

SEQ ID NO: 661099 - DNA, 54 bp, Artificial; identical to SEQ ID NO: 293278
  Synthetic oligonucleotide

SEQ ID NO: 661100 - DNA, 55 bp, Artificial; identical to SEQ ID NO: 289950
  Synthetic oligonucleotide

SEQ ID NO: 661101 - DNA, 58 bp, Artificial; identical to SEQ ID NO: 293693
  Synthetic oligonucleotide

SEQ ID NO: 661102 - DNA, 58 bp, Artificial; identical to SEQ ID NO: 295271
  Synthetic oligonucleotide

SEQ ID NO: 661103 - DNA, 54 bp, Artificial; identical to SEQ ID NO: 293272
  Synthetic oligonucleotide

SEQ ID NO: 661104 - DNA, 54 bp, Artificial; identical to SEQ ID NO: 293671
  Synthetic oligonucleotide

SEQ ID NO: 661105 - DNA, 55 bp, Artificial; identical to SEQ ID NO: 289933
  Synthetic oligonucleotide

SEQ ID NO: 661106 - DNA, 52 bp, Artificial; identical to SEQ ID NO: 293947
  Synthetic oligonucleotide

SEQ ID NO: 661107 - DNA, 55 bp, Artificial; identical to SEQ ID NO: 289930
  Synthetic oligonucleotide

SEQ ID NO: 661108 - DNA, 55 bp, Artificial; identical to SEQ ID NO: 289928
  Synthetic oligonucleotide

SEQ ID NO: 661109 - DNA, 55 bp, Artificial; identical to SEQ ID NO: 289926
  Synthetic oligonucleotide

SEQ ID NO: 661110 - DNA, 55 bp, Artificial; identical to SEQ ID NO: 289923
  Synthetic oligonucleotide

SEQ ID NO: 661111 - DNA, 60 bp, Artificial; identical to SEQ ID NO: 293604
  Synthetic oligonucleotide

SEQ ID NO: 661112 - DNA, 52 bp, Artificial; identical to SEQ ID NO: 293942
  Synthetic oligonucleotide

SEQ ID NO: 661113 - DNA, 55 bp, Artificial; identical to SEQ ID NO: 289919
  Synthetic oligonucleotide

SEQ ID NO: 661114 - DNA, 52 bp, Artificial; identical to SEQ ID NO: 293941
  Synthetic oligonucleotide

SEQ ID NO: 661115 - DNA, 56 bp, Artificial; identical to SEQ ID NO: 293582
  Synthetic oligonucleotide

SEQ ID NO: 661116 - DNA, 51 bp, Artificial; identical to SEQ ID NO: 294922
  Synthetic oligonucleotide

SEQ ID NO: 661117 - DNA, 50 bp, Artificial; identical to SEQ ID NO: 293538
  Synthetic oligonucleotide
